(19) United States
(12) Patent Application Publication
(10) Pub. No.: US 2024/0366745 A1
(43) Pub. Date: Nov. 7, 2024

(54) TROPICAL DISEASE VACCINES

(71) Applicant: ModernaTX, Inc., Cambridge, MA (US)

(72) Inventors: Giuseppe Ciaramella, Sudbury, MA (US); Sunny Himansu, Winchester, MA (US); Eric Yi-Chun Huang, Boston, MA (US); Tal Zaks, Newton, MA (US)

(73) Assignee: ModernaTX, Inc., Cambridge, MA (US)

(21) Appl. No.: 18/635,203

(22) Filed: Apr. 15, 2024

Related U.S. Application Data
(63) Continuation of application No. 17/590,479, filed on Feb. 1, 2022, now abandoned.
Application No. 17/590,479 is a continuation of application No. 16/850,519, filed on Apr. 16, 2020, now Pat. No. 11,278,611.
Application No. 16/850,519 is a continuation of application No. 16/136,503, filed on Sep. 20, 2018, now Pat. No. 10,675,342.
Application No. 16/136,503 is a continuation of application No. 15/674,591, filed on Aug. 11, 2017, now Pat. No. 10,238,731.
Application No. 15/674,591 is a continuation of application No. PCT/US2016/058324, filed on Oct. 21, 2016.
(60) Provisional application No. 62/351,255, filed on Jun. 16, 2016.
(60) Provisional application No. 62/247,347, filed on Oct. 28, 2015.
(60) Provisional application No. 62/247,390, filed on Oct. 28, 2015.
(60) Provisional application No. 62/247,445, filed on Oct. 28, 2015.
(60) Provisional application No. 62/247,595, filed on Oct. 28, 2015.
(60) Provisional application No. 62/244,937, filed on Oct. 22, 2015.
(60) Provisional application No. 62/244,814, filed on Oct. 22, 2015.
(60) Provisional application No. 62/245,207, filed on Oct. 22, 2015.
(60) Provisional application No. 62/244,950, filed on Oct. 22, 2015.
(60) Provisional application No. 62/245,031, filed on Oct. 22, 2015.

(51) Int. Cl. A61K 39/12; A61K 9/00; A61K 9/127; A61K 9/51; A61K 39/00; A61K 39/015; A61K 39/39; A61K 39/42; A61K 48/00; A61P 11/00

(52) U.S. Cl. CPC A61K 39/12; A61K 9/0019; A61K 9/1271; A61K 9/513; A61K 39/015; A61K 39/39; A61K 39/42; A61K 48/00; A61P 11/00; A61K 2039/51; A61K 2039/5254; A61K 2039/53; A61K 2039/55511; A61K 2039/55555; A61K 2039/575; C12N 2770/24034; C12N 2770/24134; C12N 2770/36134; Y02A 50/30

(57) ABSTRACT

The disclosure relates to tropical diseases such as viral mosquito borne illnesses and the treatment thereof. The invention includes ribonucleic acid vaccines and combination vaccines, as well as methods of using the vaccines and compositions comprising the vaccines for treating and preventing tropical disease.

### RELATED APPLICATIONS

[0001] This application is a continuation of U.S. application Ser. No. 17/590,479, filed Feb. 1, 2022, which is a continuation of U.S. application Ser. No. 16/850,519, filed Apr. 16, 2020, which is a continuation of U.S. application Ser. No. 16/136,503, filed Sep. 20, 2018, which is a continuation of U.S. application Ser. No. 15/674,591, filed Aug. 11, 2017, which is a continuation of international application number PCT/US2016/058324, filed Oct. 21, 2016, which was published under PCT Article 21 (2) in English, and which claims the benefit under 35 U.S.C. § 119 (e) of U.S. provisional application No. 62/351,255, filed Jun. 16, 2016, U.S. provisional application No. 62/247,347, filed Oct. 28, 2015, U.S. provisional application No. 62/247,390, filed Oct. 28, 2015, U.S. provisional application No. 62/247,445, filed Oct. 28, 2015, U.S. provisional application No. 62/247,595, filed Oct. 28, 2015, U.S. provisional application No. 62/244,937, filed Oct. 22, 2015, U.S. provisional application No. 62/244,814, filed Oct. 22, 2015, U.S. provisional application No. 62/245,207, filed Oct. 22, 2015, U.S. provisional application No. 62/244,950, filed Oct. 22, 2015, U.S. provisional application No. 62/245,031, filed Oct. 22, 2015, each of which is incorporated by reference herein in its entirety.

### REFERENCE TO AN ELECTRONIC SEQUENCE LISTING

[0002] The contents of the electronic sequence listing (M137870030US10-SEQ-JXV.xml; Size: 1,115,659 bytes; and Date of Creation: Apr. 12, 2024) is herein incorporated by reference in its entirety.

### BACKGROUND

[0003] Insects such as mosquitoes cause significant human suffering by transmission of infectious disease to humans. The infections carried by mosquitoes afflict humans, as well as companion animals such as dogs and horses. Infectious agents transmitted by mosquitos cause illnesses such as encephalitis, Chikungunya, yellow fever, West Nile fever, malaria, and Dengue. The transmission of diseases associated with mosquito bites can be interrupted by killing the mosquitoes, isolating infected people from all mosquitoes while they are infectious or vaccinating the exposed population.

[0004] Deoxyribonucleic acid (DNA) vaccination is one technique used to stimulate humoral and cellular immune responses to foreign antigens, such as Malaria, JEV, WNV, EEEV, VEEV, SINV, CHIKV, DENV, ZIKV and YFV antigens. The direct injection of genetically engineered DNA (e.g., naked plasmid DNA) into a living host results in a small number of its cells directly producing an antigen, resulting in a protective immunological response. With this technique, however, comes potential problems, including the possibility of insertional mutagenesis, which could lead to the activation of oncogenes or the inhibition of tumor suppressor genes.

### SUMMARY

[0005] Provided herein are ribonucleic acid (RNA) vaccines that build on the knowledge that RNA (e.g., messenger RNA (mRNA)) can safely direct the body's cellular machinery to produce nearly any protein of interest, from native proteins to antibodies and other entirely novel protein constructs that can have therapeutic activity inside and outside of cells. The RNA (e.g., mRNA) vaccines of the present disclosure may be used to induce a balanced immune response against Malaria (e.g., P. falciparum, P. vivax, P. malariae and/or P. ovale), Japanese Encephalitis Virus (JEV), West Nile Virus (WNV), Eastern Equine Encephalitis Virus (EEEV), Venezuelan Equine Encephalitis Virus (VEEV), Sindbis Virus (SINV), Chikungunya Virus (CHIKV), Dengue Virus (DENV), Zika Virus (ZIKV) and/or Yellow Fever Virus (YFV), comprising both cellular and humoral immunity, without risking the possibility of insertional mutagenesis, for example. Malaria (e.g., P. falciparum, P. vivax, P. malariae and/or P. ovale), JEV, WNV, EEEV, VEEV, SINV, CHIKV, DENV, ZIKV and/or YFV are referred to herein as “tropical diseases.” Thus, the terms “tropical disease vaccines” and “Malaria (e.g., P. falciparum, P. vivax, P. malariae and/or P. ovale), JEV, WNV, EEEV, VEEV, SINV, CHIKV, DENV, ZIKV and/or YFV” encompass Malaria (e.g., P. falciparum, P. vivax, P. malariae and/or P. ovale) RNA vaccines, JEV RNA vaccines, WNV RNA vaccines, EEEV RNA vaccines, SINV RNA vaccines, CHIKV RNA vaccines, DENV RNA vaccines, ZIKV RNA vaccines, YFV RNA vaccines, and combination vaccines comprising at least two (e.g., at least 3, 4, 5, 6, 7, 8 or 9) of any of the Malaria (e.g., P. falciparum, P. vivax, P. malariae and/or P. ovale) RNA vaccines, JEV RNA vaccines, WNV RNA vaccines, EEEV RNA vaccines, SINV RNA vaccines, CHIKV RNA vaccines, DENV RNA vaccines, ZIKV RNA vaccines, and YFV RNA vaccines.

[0006] The RNA (e.g., mRNA) vaccines may be utilized in various settings depending on the prevalence of the infection or the degree or level of unmet medical need. The RNA (e.g. mRNA) vaccines may be utilized to treat and/or prevent Malaria (e.g., P. falciparum, P. vivax, P. malariae and/or P. ovale), JEV, WNV, EEEV, VEEV, SINV, CHIKV, DENV, ZIKV and/or YFV of various genotypes, strains, and isolates. The RNA (e.g., mRNA) vaccines have superior properties in that they produce much larger antibody titers and responses earlier than commercially available anti-viral therapeutic treatments. While not wishing to be bound by theory, it is believed that the RNA (e.g., mRNA) vaccines, as mRNA polynucleotides, are better designed to produce the appropriate protein conformation upon translation, as the RNA (e.g., mRNA) vaccines co-opt natural cellular machinery. Unlike traditional vaccines, which are manufactured ex vivo and may trigger unwanted cellular responses, RNA (e.g., mRNA) vaccines are presented to the cellular system in a more native fashion.

[0007] Surprisingly, it has been shown that efficacy of mRNA vaccines can be significantly enhanced when combined with a flagellin adjuvant, in particular, when one or more antigen-encoding mRNA is combined with an mRNA encoding flagellin. RNA (e.g., mRNA) vaccines combined with the flagellin adjuvant (e.g., mRNA-encoded flagellin adjuvant) have superior properties in that they may produce much larger antibody titers and produce responses earlier than commercially available vaccine formulations.

[0008] Some embodiments of the present disclosure provide RNA (e.g., mRNA) vaccines that include at least one RNA (e.g., mRNA) polynucleotide having an open reading frame encoding at least one antigenic polypeptide or an immunogenic fragment thereof (e.g., an immunogenic fragment capable of inducing an immune response to the antigenic polypeptide) and at least one RNA (e.g., mRNA polynucleotide) having an open reading frame encoding a flagellin adjuvant.

[0009] In some embodiments, at least one flagellin polypeptide (e.g., encoded flagellin polypeptide) is a flagellin protein. In some embodiments, at least one flagellin polypeptide (e.g., encoded flagellin polypeptide) is an immunogenic flagellin fragment. In some embodiments, at least one flagellin polypeptide and at least one antigenic polypeptide are encoded by a single RNA (e.g., mRNA) polynucleotide. In other embodiments, at least one flagellin polypeptide and at least one antigenic polypeptide are each encoded by a different RNA polynucleotide.

[0010] In some embodiments at least one flagellin polypeptide has at least 80%, at least 85%, at least 90%, or at least 95% identity to a flagellin polypeptide having a sequence of SEQ ID NO: 420-422.

[0011] Provided herein, in some embodiments, is a ribonucleic acid (RNA) (e.g., mRNA) vaccine, comprising at least one (e.g., at least 2, 3, 4 or 5) RNA (e.g., mRNA) polynucleotide having an open reading frame encoding at least one (e.g., at least 2, 3, 4 or 5) Malaria (e.g., P. falciparum, P. vivax, P. malariae and/or P. ovale), JEV, WNV, EEEV, VEEV, SINV, CHIKV, DENV, ZIKV and/or YFV antigenic polypeptide, or any combination of two or more of the foregoing antigenic polypeptides. Herein, use of the term “antigenic polypeptide” encompasses immunogenic fragments of the antigenic polypeptide (an immunogenic fragment that induces (or is capable of inducing) an immune response to Malaria (e.g., P. falciparum, P. vivax, P. malariae and/or P. ovale), JEV, WNV, EEEV, VEEV, SINV, CHIKV, DENV, ZIKV and/or YFV) unless otherwise stated.

[0012] Also provided herein, in some embodiments, is a RNA (e.g., mRNA) vaccine comprising at least one (e.g., at least 2, 3, 4 or 5) RNA polynucleotide having an open reading frame encoding at least one (e.g., at least 2, 3, 4 or 5) Malaria (e.g., P. falciparum, P. vivax, P. malariae and/or P. ovale), JEV, WNV, EEEV, VEEV, SINV, CHIKV, DENV, ZIKV and/or YFV antigenic polypeptide or an immunogenic fragment thereof, linked to a signal peptide.

[0013] Further provided herein, in some embodiments, is a nucleic acid (e.g., DNA) encoding at least one (e.g., at least 2, 3, 4 or 5) Malaria (e.g., P. falciparum, P. vivax, P. Malariae and/or P. ovale), JEV, WNV, EEEV, VEEV, SINV, CHIKV, DENV, ZIKV and/or YFV RNA (e.g., mRNA) polynucleotide.

[0014] Further still, provided herein, in some embodiments, is a method of inducing an immune response in a subject, the method comprising administering to the subject a vaccine comprising at least one (e.g., at least 2, 3, 4 or 5) RNA (e.g., mRNA) polynucleotide having an open reading frame encoding at least one (e.g., at least 2, 3, 4 or 5) Malaria (e.g., P. falciparum, P. vivax, P. malariae and/or P. ovale), JEV, WNV, EEEV, VEEV, SINV, CHIKV, DENV, ZIKV and/or YFV antigenic polypeptide, or any combination of two or more of the foregoing antigenic polypeptides.

### Malaria

[0015] Some embodiments of the present disclosure provide Malaria vaccines that include at least one ribonucleic acid (RNA) polynucleotide having an open reading frame encoding at least one Plasmodium (e.g., P. falciparum, P. vivax, P. malariae and/or P. ovale) antigenic polypeptide or an immunogenic fragment thereof (e.g., an immunogenic fragment capable of raising an immune response to Plasmodium).

[0016] In some embodiments, the antigenic polypeptide is a circumsporozoite (CS) protein or an immunogenic fragment thereof (e.g., capable of raising an immune response against Plasmodium).

[0017] In some embodiments, the CS protein or fragment is fused to the surface antigen from hepatitis B (HBsAg). In some embodiments, the CS protein or fragment is in the form of a hybrid protein comprising substantially all the C-terminal portion of the CS protein of Plasmodium, four or more tandem repeats of the CS protein immunodominant region, and the surface antigen from hepatitis B (HBsAg). In some embodiments, the hybrid protein comprises a sequence of CS protein of Plasmodium falciparum substantially as corresponding to amino acids 207-395 of P. falciparum NF54 strain 3D7 clone CS protein fused in frame via a linear linker to the N-terminal of HBsAg (Ballou W R et al. Am J Trop Med Hyg 2004; 71 (2_suppl): 239-247, incorporated herein by reference).

[0018] In some embodiments, the hybrid protein is RTS. In some embodiments, the RTS is in the form of mixed particles RTS,S. In some embodiments, the amount of RTS,S is 25 μg or 50 μg per dose.

[0019] In some embodiments, the antigenic polypeptide is liver stage antigen 1 (LSA1) or an immunogenic fragment thereof. In some embodiments, the antigenic polypeptide is LSA-NRC.

[0020] In some embodiments, the antigenic polypeptide is merozoite surface protein-1 (MSP1) or an immunogenic fragment thereof.

[0021] In some embodiments, the antigenic polypeptide is apical membrane antigen 1 (AMA1) or an immunogenic fragment thereof.

[0022] In some embodiments, the antigenic polypeptide is thrombospondin related adhesive protein (TRAP) or an immunogenic fragment thereof.

[0023] In some embodiments, at least one RNA polynucleotide is encoded by at least one nucleic acid sequence identified by any one of SEQ ID NO: 1-6 (Table 1) and homologs having at least 80% identity with a nucleic acid sequence identified by any one of SEQ ID NO: 1-6 (Table 1). In some embodiments, at least one RNA polynucleotide is encoded by at least one nucleic acid sequence identified by any one of SEQ ID NO: 1-6 (Table 1) and homologs having at least 90% (90%, 91%, 92%, 93%, 94%, 95%, 96%, 97%, 98%, 99%, 99.8% or 99.9%) identity with a nucleic acid sequence identified by any one of SEQ ID NO: 1-6 (Table 1). In some embodiments, at least one RNA polynucleotide is encoded by at least one fragment of a nucleic acid sequence identified by any one of SEQ ID NO: 1-6 (Table 1).

[0024] In some embodiments, at least one RNA polynucleotide comprises at least one nucleic acid sequence identified by any one of SEQ ID NO: 7-12 (Table 1) and homologs having at least 80% identity with a nucleic acid sequence identified by any one of SEQ ID NO: 7-12 (Table 1). In some embodiments, at least one RNA polynucleotide comprises at least one nucleic acid sequence identified by any one of SEQ ID NO: 7-12 (Table 1) and homologs having at least 90% (90%, 91%, 92%, 93%, 94%, 95%, 96%, 97%, 98%, 99%, 99.8% or 99.9%) identity with a nucleic acid sequence identified by any one of SEQ ID NO: 7-12 (Table 1). In some embodiments, at least one RNA polynucleotide comprises at least one fragment of a nucleic acid sequence identified by any one of SEQ ID NO: 7-12 (Table 1).

[0025] In some embodiments, the at least one RNA polynucleotide encodes at least one antigenic polypeptide having a sequence identified by any one of SEQ ID NO: 13-17 (Table 2 and 3). In some embodiments, the at least one RNA polynucleotide encodes at least one protein variant having at least 95% identity to an antigenic polypeptide having a sequence identified by any one of SEQ ID NO: 13-17 (Table 2 and 3). In some embodiments, at least one antigenic polypeptide has an amino acid sequence identified by any one of SEQ ID NO: 13-17 (Table 2 and 3). In some embodiments, at least one antigenic polypeptide has at least 95% identity to an antigenic polypeptide having a sequence identified by any one of SEQ ID NO: 13-17 (Table 2 and 3).

### Japanese Encephalitis Virus (JEV)

[0026] Some embodiments of the present disclosure provide JEV vaccines that include at least one ribonucleic acid (RNA) polynucleotide having an open reading frame encoding at least one JEV antigenic polypeptide or an immunogenic fragment thereof (e.g., an immunogenic fragment capable of inducing an immune response to JEV).

[0027] In some embodiments, at least one antigenic polypeptide is JEV E protein, JEV Es, JEV prM, JEV capsid, JEV NS1, JEV prM and E polyprotein (prME) or an immunogenic fragment thereof. In some embodiments, at least one antigenic polypeptide has at least 80%, 85%, 90%, 92%, 95%, 96%, 97%, 98% or 99% sequence identity to JEV E protein, JEV Es, JEV prM, JEV capsid, prME or JEV NS1.

[0028] In some embodiments, at least one RNA polynucleotide is encoded by at least one nucleic acid sequence identified by any one of SEQ ID NO: 18-19 (Table 4) and homologs having at least 80% identity with a nucleic acid sequence identified by any one of SEQ ID NO: 18-19 (Table 4). In some embodiments, at least one RNA polynucleotide is encoded by at least one nucleic acid sequence identified by any one of SEQ ID NO: 18-19 (Table 4) and homologs having at least 90% (90%, 91%, 92%, 93%, 94%, 95%, 96%, 97%, 98%, 99%, 99.8% or 99.9%) identity with a nucleic acid sequence identified by any one of SEQ ID NO: 18-19 (Table 4). In some embodiments, at least one RNA polynucleotide is encoded by at least one fragment of a nucleic acid sequence identified by any one of SEQ ID NO: 18-19 (Table 4).

[0029] In some embodiments, at least one RNA polynucleotide comprises at least one nucleic acid sequence identified by any one of SEQ ID NO: 20-21 (Table 4) and homologs having at least 80% identity with a nucleic acid sequence identified by any one of SEQ ID NO: 20-21 (Table 4). In some embodiments, at least one RNA polynucleotide comprises at least one nucleic acid sequence identified by any one of SEQ ID NO: 20-21 (Table 4) and homologs having at least 90% (90%, 91%, 92%, 93%, 94%, 95%, 96%, 97%, 98%, 99%, 99.8% or 99.9%) identity with a nucleic acid sequence identified by any one of SEQ ID NO: 20-21 (Table 4). In some embodiments, at least one RNA polynucleotide comprises at least one fragment of a nucleic acid sequence identified by any one of SEQ ID NO: 20-21 (Table 4).

[0030] In some embodiments, the at least one RNA polynucleotide encodes at least one antigenic polypeptide having a sequence identified by any one of SEQ ID NO: 22-29 (Table 5 and 6). In some embodiments, the at least one RNA polynucleotide encodes at least one protein variant having at least 95% identity to an antigenic polypeptide having a sequence identified by any one of SEQ ID NO: 22-29 (Table 5 and 6). In some embodiments, at least one antigenic polypeptide has an amino acid sequence identified by any one of SEQ ID NO: 22-29 (Table 5 and 6). In some embodiments, at least one antigenic polypeptide has at least 95% identity to an antigenic polypeptide having a sequence identified by any one of SEQ ID NO: 22-29 (Table 5 and 6).

### West Nile Virus (WNV), Eastern Equine Encephalitis (EEEV), Venezuelan Equine Encephalitis Virus (VEEV), and Sindbis Virus (SINV)

[0031] Some embodiments of the present disclosure provide combination vaccines comprising one or more RNA (e.g., mRNA) polynucleotides. The RNA polynucleotide(s) encode one or more Arbovirus antigens and/or one or more Alphavirus antigens, on either the same polynucleotide or different polynucleotides. RNA polynucleotides featured in the vaccines of the present invention can encode one antigen or can encode more than one antigen, e.g., several antigens (for example, polycistronic RNAs).

[0032] In some embodiments, at least one RNA polynucleotide is encoded by at least one nucleic acid sequence identified by any one of SEQ ID NO: 30-34, 48-49, 55-56 (Table 9, 12, 15) and homologs having at least 80% identity with a nucleic acid sequence identified by any one of SEQ ID NO: 30-34, 48-49, 55-56 (Table 9, 12, 15). In some embodiments, at least one RNA polynucleotide is encoded by at least one nucleic acid sequence identified by any one of SEQ ID NO: 30-34, 48-49, 55-56 (Table 9, 12, 15) and homologs having at least 90% (90%, 91%, 92%, 93%, 94%, 95%, 96%, 97%, 98%, 99%, 99.8% or 99.9%) identity with a nucleic acid sequence identified by any one of SEQ ID NO: 30-34, 48-49, 55-56 (Table 9, 12, 15). In some embodiments, at least one RNA polynucleotide is encoded by at least one fragment of a nucleic acid sequence identified by any one of SEQ ID NO: 30-34, 48-49, 55-56 (Table 9, 12, 15).

[0033] In some embodiments, at least one RNA polynucleotide comprises at least one nucleic acid sequence identified by any one of SEQ ID NO: 35-39, 50-51, 57-58 (Table 9, 12, 15) and homologs having at least 80% identity with a nucleic acid sequence identified by any one of SEQ ID NO: 35-39, 50-51, 57-58 (Table 9, 12, 15). In some embodiments, at least one RNA polynucleotide comprises at least one nucleic acid sequence identified by any one of SEQ ID NO: 35-39, 50-51, 57-58 (Table 9, 12, 15) and homologs having at least 90% (90%, 91%, 92%, 93%, 94%, 95%, 96%, 97%, 98%, 99%, 99.8% or 99.9%) identity with a nucleic acid sequence identified by any one of SEQ ID NO: 35-39, 50-51, 57-58 (Table 9, 12, 15). In some embodiments, at least one RNA polynucleotide comprises at least one fragment of a nucleic acid sequence identified by any one of SEQ ID NO: 35-39, 50-51, 57-58 (Table 9, 12, 15).

[0034] In some embodiments, the at least one RNA polynucleotide encodes at least one antigenic polypeptide having a sequence identified by any one of SEQ ID NO: 44-47, 52-54, 59-64 (Table 10, 11, 13, 14, 16, 17 and 18). In some embodiments, the at least one RNA polynucleotide encodes at least one protein variant having at least 95% identity to an antigenic polypeptide having a sequence identified by any one of SEQ ID NO: 44-47, 52-54, 59-64 (Table 10, 11, 13, 14, 16, 17 and 18). In some embodiments, at least one antigenic polypeptide has an amino acid sequence identified by any one of SEQ ID NO: 44-47, 52-54, 59-64 (Table 10, 11, 13, 14, 16, 17 and 18). In some embodiments, at least one antigenic polypeptide has at least 95% identity to an antigenic polypeptide having a sequence identified by any one of SEQ ID NO: 44-47, 52-54, 59-64 (Table 10, 11, 13, 14, 16, 17 and 18).

### Yellow Fever Virus (YFV)

[0035] Yellow fever is an acute viral haemorrhagic disease transmitted by infected mosquitoes. The “yellow” in the name refers to the jaundice that affects some patients. Symptoms of yellow fever include fever, headache, jaundice, muscle pain, nausea, vomiting and fatigue. A small proportion of patients who contract the virus develop severe symptoms and approximately half of those die within 7 to 10 days. Yellow fever virus (YFV) is endemic in tropical areas of Africa and Central and South America. Large epidemics of yellow fever occur when infected people introduce the virus into heavily populated areas with high mosquito density and where most people have little or no immunity, due to lack of vaccination. In these conditions, infected mosquitoes transmit the virus from person to person. Since the launch of the Yellow Fever Initiative in 2006, significant progress in combatting the disease has been made in West Africa and more than 105 million people have been vaccinated in mass campaigns using an attenuated live vaccine. Nonetheless, this vaccine can cause yellow fever vaccine-associated viscerotropic disease as well as yellow fever vaccine-associated neurotropic disease, each of which can be fatal.

[0036] Some embodiments of the present disclosure provide Yellow fever virus (YFV) vaccines that include at least one ribonucleic acid (RNA) polynucleotide (e.g., mRNA polynucleotide) having an open reading frame encoding at least one YFV antigenic polypeptide or an immunogenic fragment thereof (e.g., an immunogenic fragment capable of inducing an immune response to YFV).

[0037] In some embodiments, the at least one antigenic polypeptide is a YFV polyprotein.

[0038] In some embodiments, the at least one antigenic polypeptide is a YFV capsid protein, a YFV premembrane/membrane protein, a YFV envelope protein, a YFV non-structural protein 1, a YFV non-structural protein 2A, a YFV non-structural protein 2B, a YFV non-structural protein 3, a YFV non-structural protein 4A, a YFV non-structural protein 4B, or a YFV non-structural protein 5.

[0039] In some embodiments, the at least one antigenic polypeptide is a YFV capsid protein or an immunogenic fragment thereof, a YFV premembrane/membrane protein or an immunogenic fragment thereof, and a YFV envelope protein or an immunogenic fragment thereof.

[0040] In some embodiments, the at least one antigenic polypeptide is a YFV capsid protein or an immunogenic fragment thereof and a YFV premembrane/membrane protein or an immunogenic fragment thereof.

[0041] In some embodiments, the at least one antigenic polypeptide is a YFV capsid protein or an immunogenic fragment thereof and a YFV envelope protein or an immunogenic fragment thereof.

[0042] In some embodiments, at least one antigenic polypeptide is a YFV premembrane/membrane protein or an immunogenic fragment thereof and a YFV envelope protein or an immunogenic fragment thereof.

[0043] In some embodiments, the at least one antigenic polypeptide further comprises any one or more of a YFV non-structural protein 1, 2A, 2B, 3, 4A, 4B or 5.

[0044] In some embodiments, at least one RNA polynucleotide is encoded by at least one nucleic acid sequence identified by any one of SEQ ID NO: 65-80 (Table 21) and homologs having at least 80% identity with a nucleic acid sequence identified by any one of SEQ ID NO: 65-80 (Table 21). In some embodiments, at least one RNA polynucleotide is encoded by at least one nucleic acid sequence identified by any one of SEQ ID NO: 65-80 (Table 21) and homologs having at least 90% (90%, 91%, 92%, 93%, 94%, 95%, 96%, 97%, 98%, 99%, 99.8% or 99.9%) identity with a nucleic acid sequence identified by any one of SEQ ID NO: 65-80 (Table 21). In some embodiments, at least one RNA polynucleotide is encoded by at least one fragment of a nucleic acid sequence identified by any one of SEQ ID NO: 65-80 (Table 21).

[0045] In some embodiments, at least one RNA polynucleotide comprises at least one nucleic acid sequence identified by any one of SEQ ID NO: 81-96 (Table 21) and homologs having at least 80% identity with a nucleic acid sequence identified by any one of SEQ ID NO: 81-96 (Table 21). In some embodiments, at least one RNA polynucleotide comprises at least one nucleic acid sequence identified by any one of SEQ ID NO: 81-96 (Table 21) and homologs having at least 90% (90%, 91%, 92%, 93%, 94%, 95%, 96%, 97%, 98%, 99%, 99.8% or 99.9%) identity with a nucleic acid sequence identified by any one of SEQ ID NO: 81-96 (Table 21). In some embodiments, at least one RNA polynucleotide comprises at least one fragment of a nucleic acid sequence identified by any one of SEQ ID NO: 81-96 (Table 21).

[0046] In some embodiments, the at least one RNA polynucleotide encodes at least one antigenic polypeptide having a sequence identified by any one of SEQ ID NO: 97-117 (Table 22). In some embodiments, the at least one RNA polynucleotide encodes at least one protein variant having at least 95% identity to an antigenic polypeptide having a sequence identified by any one of SEQ ID NO: 97-117 (Table 22). In some embodiments, at least one antigenic polypeptide has an amino acid sequence identified by any one of SEQ ID NO: 97-117 (Table 22). In some embodiments, at least one antigenic polypeptide has at least 95% identity to an antigenic polypeptide having a sequence identified by any one of SEQ ID NO: 97-117 (Table 22).

### Zika Virus (ZIKV)

[0047] Zika virus (ZIKV) is a member of the Flaviviridae virus family and the flavivirus genus. In humans, it causes a disease known as Zika fever. It is related to dengue, yellow fever, West Nile and Japanese encephalitis, viruses that are also members of the virus family Flaviviridae. ZIKV is spread to people through mosquito bites. The most common symptoms of ZIKV disease (Zika) are fever, rash, joint pain, and red eye. The illness is usually mild with symptoms lasting from several days to a week. There is no vaccine to prevent, or medicine to treat, Zika virus.

[0048] Some embodiments of the present disclosure provide Zika virus (ZIKV) vaccines that include at least one ribonucleic acid (RNA) polynucleotide (e.g., mRNA polynucleotide) having an open reading frame encoding at least one ZIKV antigenic polypeptide or an immunogenic fragment thereof (e.g., an immunogenic fragment capable of inducing an immune response to ZIKV).

[0049] In some embodiments, at least one antigenic polypeptide is a ZIKV polyprotein. In some embodiments, at least one antigenic polypeptide is a ZIKV structural polyprotein. In some embodiments, at least one antigenic polypeptide is a ZIKV nonstructural polyprotein.

[0050] In some embodiments, at least one antigenic polypeptide is a ZIKV capsid protein, a ZIKV premembrane/membrane protein, a ZIKV envelope protein, a ZIKV non-structural protein 1, a ZIKV non-structural protein 2A, a ZIKV non-structural protein 2B, a ZIKV non-structural protein 3, a ZIKV non-structural protein 4A, a ZIKV non-structural protein 4B, or a ZIKV non-structural protein 5.

[0051] In some embodiments, at least one antigenic polypeptide is a ZIKV capsid protein, a ZIKV premembrane/membrane protein, a ZIKV envelope protein, a ZIKV non-structural protein 1, a ZIKV non-structural protein 2A, a ZIKV non-structural protein 2B, a ZIKV non-structural protein 3, a ZIKV non-structural protein 4A, a ZIKV non-structural protein 4B, or a ZIKV non-structural protein 5.

[0052] In some embodiments, the vaccine comprises a RNA polynucleotide having an open reading frame encoding a ZIKV capsid protein, a RNA polynucleotide having an open reading frame encoding a ZIKV premembrane/membrane protein, and a RNA polynucleotide having an open reading frame encoding a ZIKV envelope protein.

[0053] In some embodiments, the vaccine comprises a RNA polynucleotide having an open reading frame encoding a ZIKV capsid protein and a RNA polynucleotide having an open reading frame encoding a ZIKV premembrane/membrane protein.

[0054] In some embodiments, the vaccine comprises a RNA polynucleotide having an open reading frame encoding a ZIKV capsid protein and a RNA polynucleotide having an open reading frame encoding a ZIKV envelope protein.

[0055] In some embodiments, the vaccine comprises a RNA polynucleotide having an open reading frame encoding a ZIKV premembrane/membrane protein and a RNA polynucleotide having an open reading frame encoding a ZIKV envelope protein.

[0056] In some embodiments, the vaccine comprises a RNA polynucleotide having an open reading frame encoding a ZIKV capsid protein and at least one RNA polynucleotide having an open reading frame encoding any one or more of a ZIKV non-structural protein 1, 2A, 2B, 3, 4A, 4B or 5.

[0057] In some embodiments, the vaccine comprises a RNA polynucleotide having an open reading frame encoding a ZIKV premembrane/membrane protein and at least one RNA polynucleotide having an open reading frame encoding any one or more of a ZIKV non-structural protein 1, 2A, 2B, 3, 4A, 4B or 5.

[0058] In some embodiments, the vaccine comprises a RNA polynucleotide having an open reading frame encoding a ZIKV envelope protein and at least one RNA polynucleotide having an open reading frame encoding any one or more of a ZIKV non-structural protein 1, 2A, 2B, 3, 4A, 4B or 5.

[0059] In some embodiments, the at least one antigenic polypeptide comprises a combination of any two or more of a ZIKV capsid protein, a ZIKV premembrane/membrane protein, a ZIKV envelope protein, a ZIKV non-structural protein 1, a ZIKV non-structural protein 2A, a ZIKV non-structural protein 2B, a ZIKV non-structural protein 3, a ZIKV non-structural protein 4A, a ZIKV non-structural protein 4B, or a ZIKV non-structural protein 5.

[0060] In some embodiments, at least one RNA polynucleotide is encoded by at least one nucleic acid sequence identified by any one of SEQ ID NO: 118-136 (Table 25) and homologs having at least 80% identity with a nucleic acid sequence identified by any one of SEQ ID NO: 118-136 (Table 25). In some embodiments, at least one RNA polynucleotide is encoded by at least one nucleic acid sequence identified by any one of SEQ ID NO: 118-136 (Table 25) and homologs having at least 90% (90%, 91%, 92%, 93%, 94%, 95%, 96%, 97%, 98%, 99%, 99.8% or 99.9%) identity with a nucleic acid sequence identified by any one of SEQ ID NO: 118-136 (Table 25). In some embodiments, at least one RNA polynucleotide is encoded by at least one fragment of a nucleic acid sequence identified by any one of SEQ ID NO: 118-136 (Table 25).

[0061] In some embodiments, at least one RNA polynucleotide comprises at least one nucleic acid sequence identified by any one of SEQ ID NO: 137-155 (Table 25) and homologs having at least 80% identity with a nucleic acid sequence identified by any one of SEQ ID NO: 137-155 (Table 25). In some embodiments, at least one RNA polynucleotide comprises at least one nucleic acid sequence identified by any one of SEQ ID NO: 137-155 (Table 25) and homologs having at least 90% (90%, 91%, 92%, 93%, 94%, 95%, 96%, 97%, 98%, 99%, 99.8% or 99.9%) identity with a nucleic acid sequence identified by any one of SEQ ID NO: 137-155 (Table 25). In some embodiments, at least one RNA polynucleotide comprises at least one fragment of a nucleic acid sequence identified by any one of SEQ ID NO: 137-155 (Table 25).

[0062] In some embodiments, the at least one RNA polynucleotide encodes at least one antigenic polypeptide having a sequence identified by any one of SEQ ID NO: 156-222 or 469 (Table 26 and 27). In some embodiments, the at least one RNA polynucleotide encodes at least one protein variant having at least 95% identity to an antigenic polypeptide having a sequence identified by any one of SEQ ID NO: 156-222 or 469 (Table 26 and 27). In some embodiments, at least one antigenic polypeptide has an amino acid sequence identified by any one of SEQ ID NO: 156-222 or 469 (Table 26 and 27). In some embodiments, at least one antigenic polypeptide has at least 95% identity to an antigenic polypeptide having a sequence identified by any one of SEQ ID NO: 156-222 or 469 (Table 26 and 27).

### Dengue Virus (DENV)

[0063] Dengue virus (DENV) is a mosquito-borne (Aedes aegypti/Aedes albopictus) member of the family Flaviviridae (positive-sense, single-stranded RNA virus). Dengue virus is a positive-sense RNA virus of the Flavivirus genus of the Flaviviridae family, which also includes West Nile virus, Yellow Fever Virus, and Japanese Encephalitis virus. It is transmitted to humans through Stegomyia aegypti (formerly Aedes) mosquito vectors and is mainly found in the tropical and semitropical areas of the world, where it is endemic in Asia, the Pacific region, Africa, Latin America, and the Caribbean. The incidence of infections has increased 30-fold over the last 50 years (WHO, Dengue: Guidelines for diagnosis, treatment, prevention, and control (2009)) and Dengue virus is the second most common tropical infectious disease worldwide after malaria.

[0064] Severe disease is most commonly observed in secondary, heterologous DENV infections. Antibody-dependent enhancement of infection has been proposed as the primary mechanism of dengue immunopathogenesis. The potential risk of immune enhancement of infection and disease underscores the importance of developing dengue vaccines which produce balanced, long-lasting immunity to at least DENV 1-4, if not all five of the DENV serotypes. While several dengue vaccines are in development, none have been officially licensed and/or approved to date.

[0065] In view of the lack of Dengue virus (DENV) vaccines, there is a significant need for a vaccine that would be safe and effective in all patient populations to prevent and/or to treat DENV infection, including those individuals at risk for secondary, heterotypic infections (those with more than one circulating serotype).

[0066] Some embodiments of the present disclosure provide Dengue virus (DENV) vaccines that include at least one ribonucleic acid (RNA) polynucleotide (e.g., mRNA polynucleotide) having an open reading frame encoding at least one DENV antigenic polypeptide or an immunogenic fragment thereof (e.g., an immunogenic fragment capable of inducing an immune response to DENV).

[0067] The methods of the present disclosure, in some embodiments, enable the production of highly antigenic DENV RNA vaccines, including RNA polynucleotides encoding concatemeric peptide epitopes. The peptide epitopes are designed to be processed intracellularly and presented to the immune system in an efficient manner. The RNA (e.g., mRNA) vaccines described herein are useful for generating a desired immune response by selecting appropriate T or B cell epitopes which are able to be presented more effectively on MHC-I or MHC-II molecules (depending on whether they are T or B-cell epitopes, respectively).

[0068] In some embodiments, the at least one RNA polynucleotide encodes a DENV capsid protein or immunogenic fragment or epitope thereof. In some embodiments, the at least one RNA polynucleotide encodes a DENV membrane protein or immunogenic fragment or epitope thereof. In some embodiments, the at least one RNA polynucleotide encodes a DENV precursor-membrane protein or immunogenic fragment or epitope thereof. In some embodiments, the at least one RNA polynucleotide encodes a DENV precursor membrane (prM) and envelope (E) polypeptide (DENV prME) or immunogenic fragment or epitope thereof. In some embodiments, the at least one RNA (e.g., mRNA) polynucleotide encodes a DENV nonstructural protein or immunogenic fragment or epitope thereof, for example a DENV non-structural protein selected from NS1, NS2A, NS2B, NS3, NS4A, NS4B, and NS5 proteins, or immunogenic fragments or epitopes thereof. In some embodiments, the DENV non-structural protein is NS3.

[0069] In some embodiments, the Dengue virus antigen comprises one or more Dengue virus peptide epitopes. In some embodiments, the one or more Dengue virus peptide epitopes is from a DENV envelope protein. In some embodiments, the one or more Dengue virus peptide epitopes is from a DENV capsid protein. In some embodiments, the one or more Dengue virus peptide epitopes is from a DENV membrane protein. In some embodiments, the one or more Dengue virus peptide epitopes is from a DENV pre-membrane protein. In some embodiments, the one or more Dengue virus peptide epitopes is from a sequence comprising DENV precursor membrane (prM) and envelope (E) polypeptide (DENV prME). In some embodiments, the at least one Dengue virus antigen is a DENV2 prME peptide epitope. In some embodiments, the one or more Dengue virus peptide epitopes is from a DENV nonstructural protein.

[0070] In any of these embodiments, the at least one RNA (e.g., mRNA) polynucleotide encodes a DENV polypeptide, fragment, or epitope from a DENV serotype selected from DENV-1, DENV-2, DENV-3, DENV-4, and DENV-5. In some embodiments, the one or more Dengue virus peptide epitopes is from a DENV-2 serotype. In some embodiments, the one or more Dengue virus peptide epitopes is from a DENV2 membrane polypeptide. In some embodiments, the one or more Dengue virus peptide epitopes is from a DENV2 envelope polypeptide. In some embodiments, the one or more Dengue virus peptide epitopes is from a DENV2 pre-membrane polypeptide. In some embodiments, the one or more Dengue virus peptide epitopes is from a DENV2 capsid polypeptide. In some embodiments, the one or more Dengue virus peptide epitopes is from a DENV2 non-structural polypeptide. In some embodiments, the one or more Dengue virus peptide epitopes is from a DENV2 pre-membrane polypeptide. In some embodiments, the one or more Dengue virus peptide epitopes is from a DENV2 PrME polypeptide.

[0071] In some embodiments, the Dengue virus antigen is a concatemeric Dengue virus antigen comprising two or more Dengue virus peptide epitopes. In some embodiments, the Dengue virus concatemeric antigen comprises between 2-100 Dengue peptide epitopes interspersed by cleavage sensitive sites. In some embodiments, the peptide epitopes are not epitopes of antibody dependent enhancement. In some embodiments, the Dengue virus vaccine's peptide epitopes are T cell epitopes and/or B cell epitopes. In other embodiments, the Dengue virus vaccine's peptide epitopes comprise a combination of T cell epitopes and B cell epitopes. In some embodiments, at least one of the peptide epitopes of the Dengue virus vaccine is a T cell epitope.

[0072] In some embodiments, the protease cleavage site of the Dengue virus vaccine comprises the amino acid sequence GFLG (SEQ ID NO: 429), KVSR (SEQ ID NO: 430), TVGLR (SEQ ID NO: 431), PMGLP (SEQ ID NO: 432), or PMGAP (SEQ ID NO: 433).

[0073] In some embodiments, the at least one RNA polynucleotide encodes a DENV envelope protein, and one or more concatemeric Dengue virus antigen(s), such as any of the concatemeric antigens described herein. In some embodiments, the at least one RNA polynucleotide encodes a DENV membrane protein, and a concatemeric virus antigen, such as any of the concatemeric antigens described herein. In some embodiments, the at least one RNA polynucleotide encodes a DENV capsid protein and a concatemeric virus antigen, such as any of the concatemeric antigens described herein. In some embodiments, the at least one RNA polynucleotide encodes a DENV nonstructural protein, for example a DENV non-structural protein selected from NS1, NS2A, NS2B, NS3, SN4A, NS4B, and NS5 proteins, and a concatemeric Dengue virus antigen, such as any of the concatemeric antigens described herein. In some embodiments, the DENV non-structural protein is NS3. In some embodiments, the at least one RNA polynucleotide encodes a DENV precursor membrane protein, and one or more concatemeric Dengue virus antigen(s), such as any of the concatemeric antigens described herein. In some embodiments, the at least one RNA polynucleotide encodes a DENV prME polypeptide, and one or more concatemeric Dengue virus antigen(s), such as any of the concatemeric antigens described herein.

[0074] In some embodiments, the peptide epitopes comprise at least one MHC class I epitope and at least one MHC class II epitope. In some embodiments, at least 10% of the epitopes are MHC class I epitopes. In some embodiments, at least 20% of the epitopes are MHC class I epitopes. In some embodiments, at least 30% of the epitopes are MHC class I epitopes. In some embodiments, at least 40% of the epitopes are MHC class I epitopes. In some embodiments, at least 50%, 60%, 70%, 80%, 90% or 100% of the epitopes are MHC class I epitopes. In some embodiments, at least 10% of the epitopes are MHC class II epitopes. In some embodiments, at least 20% of the epitopes are MHC class II epitopes. In some embodiments, at least 30% of the epitopes are MHC class II epitopes. In some embodiments, at least 40% of the epitopes are MHC class II epitopes. In some embodiments, at least 50%, 60%, 70%, 80%, 90% or 100% of the epitopes are MHC class II epitopes. In some embodiments, the ratio of MHC class I epitopes to MHC class II epitopes is a ratio selected from about 10%:about 90%; about 20%:about 80%; about 30%:about 70%; about 40%:about 60%; about 50%:about 50%; about 60%:about 40%; about 70%:about 30%; about 80%:about 20%; about 90%:about 10% MHC class 1:MHC class II epitopes. In some embodiments, the ratio of MHC class II epitopes to MHC class I epitopes is a ratio selected from about 10%:about 90%; about 20%:about 80%; about 30%:about 70%; about 40%:about 60%; about 50%:about 50%; about 60%:about 40%; about 70%:about 30%; about 80%:about 20%; about 90%:about 10% MHC class I1:MHC class I epitopes. In some embodiments, at least one of the peptide epitopes of the Dengue virus vaccine is a B cell epitope. In some embodiments, the T cell epitope of the Dengue virus vaccine comprises between 8-11 amino acids. In some embodiments, the B cell epitope of the Dengue virus vaccine comprises between 13-17 amino acids.

[0075] In any of these embodiments, the concatemeric Dengue virus antigen may comprise two or more Dengue virus peptide epitopes selected from a DENV envelope polypeptide, DENV capsid polypeptide, DENV membrane polypeptide, DENV precursor-membrane polypeptide, DENV nonstructural polypeptide, DENV prME polypeptide, and any combination thereof, and the two or more Dengue virus peptide epitopes may be from any DENV serotype, for example, a DENV serotype selected from DENV-1, DENV-2, DENV-3, DENV-4, DENV-5 and combinations thereof. In some embodiments, the concatemeric Dengue virus antigen comprises two or more Dengue virus peptide epitopes from DENV-2 serotype. In some embodiments, the concatemeric Dengue virus antigen comprises two or more DENV2 prME peptide epitopes, which may be the same or different DENV prME peptide epitopes.

[0076] In some embodiments, at least one RNA polynucleotide is encoded by at least one nucleic acid sequence identified by any one of SEQ ID NO: 223-239 (Table 28) and homologs having at least 80% identity with a nucleic acid sequence identified by any one of SEQ ID NO: 223-239 (Table 28). In some embodiments, at least one RNA polynucleotide is encoded by at least one nucleic acid sequence identified by any one of SEQ ID NO: 223-239 (Table 28) and homologs having at least 90% (90%, 91%, 92%, 93%, 94%, 95%, 96%, 97%, 98%, 99%, 99.8% or 99.9%) identity with a nucleic acid sequence identified by any one of SEQ ID NO: 223-239 (Table 28). In some embodiments, at least one RNA polynucleotide is encoded by at least one fragment of a nucleic acid sequence identified by any one of SEQ ID NO: 223-239 (Table 28).

[0077] In some embodiments, at least one RNA polynucleotide comprises at least one nucleic acid sequence identified by any one of SEQ ID NO: 240-256 (Table 28) and homologs having at least 80% identity with a nucleic acid sequence identified by any one of SEQ ID NO: 240-256 (Table 28). In some embodiments, at least one RNA polynucleotide comprises at least one nucleic acid sequence identified by any one of SEQ ID NO: 240-256 (Table 28) and homologs having at least 90% (90%, 91%, 92%, 93%, 94%, 95%, 96%, 97%, 98%, 99%, 99.8% or 99.9%) identity with a nucleic acid sequence identified by any one of SEQ ID NO: 240-256 (Table 28). In some embodiments, at least one RNA polynucleotide comprises at least one fragment of a nucleic acid sequence identified by any one of SEQ ID NO: 240-256 (Table 28).

[0078] In some embodiments, the at least one RNA polynucleotide encodes at least one antigenic polypeptide having a sequence identified by any one of SEQ ID NO: 259-291 (Table 29 and 42). In some embodiments, the at least one RNA polynucleotide encodes at least one protein variant having at least 95% identity to an antigenic polypeptide having a sequence identified by any one of SEQ ID NO: 259-291 (Table 29 and 42). In some embodiments, at least one antigenic polypeptide has an amino acid sequence identified by any one of SEQ ID NO: 259-291 (Table 29 and 42). In some embodiments, at least one antigenic polypeptide has at least 95% identity to an antigenic polypeptide having a sequence identified by any one of SEQ ID NO: 259-291 (Table 29 and 42).

### Chikungunya Virus (CHIKV)

[0079] Some embodiments of the present disclosure provide Chikungunya virus (CHIKV) vaccines that include at least one ribonucleic acid (RNA) polynucleotide (e.g., mRNA polynucleotide) having an open reading frame encoding at least one CHIKV antigenic polypeptide or an immunogenic fragment thereof (e.g., an immunogenic fragment capable of inducing an immune response to CHIKV).

[0080] Chikungunya virus (CHIKV) is a mosquito-borne virus belonging to the Alphavirus genus of the Togaviridae family that was first isolated in 1953 in Tanzania, where the virus was endemic. Outbreaks occur repeatedly in west, central, and southern Africa and have caused several human epidemics in those areas since that time. The virus is passed to humans by two species of mosquito of the genus Aedes: A. albopictus and A. aegypti. There are several Chikungunya genotypes: Indian Ocean, East/Central/South African (ECSA), Asian, West African, and Brazilian.

[0081] The CHIKV antigenic polypeptide may be a Chikungunya structural protein or an antigenic fragment or epitope thereof. In some embodiments, the antigenic polypeptide is a CHIKV structural protein or an antigenic fragment thereof. For example, a CHIKV structural protein may be an envelope protein (E), a 6K protein, or a capsid (C) protein. In some embodiments, the CHIKV structural protein is an envelope protein selected from E1, E2, and E3. In some embodiments, the CHIKV structural protein is E1 or E2. In some embodiments, the CHIKV structural protein is a capsid protein. In some embodiments, the antigenic polypeptide is a fragment or epitope of a CHIKV structural protein.

[0082] In some embodiments, the antigenic polypeptide comprises two or more CHIKV structural proteins. In some embodiments, the two or more CHIKV structural proteins are envelope proteins. In some embodiments, the two or more CHIKV structural proteins are E1 and E2. In some embodiments, the two or more CHIKV structural proteins are E1 and E3. In some embodiments, the two or more CHIKV structural proteins are E2 and E3. In some embodiments, the two or more CHIKV structural proteins are E1, E2, and E3. In some embodiments, the two or more CHIKV structural proteins are envelope and capsid proteins. In some embodiments, the two or more CHIKV structural proteins are E1 and C. In some embodiments, the two or more CHIKV structural proteins are E2 and C. In some embodiments, the two or more CHIKV structural proteins are E3 and C. In some embodiments, the two or more CHIKV structural proteins are E1, E2, and C. In some embodiments, the two or more CHIKV structural proteins are E1, E3, and C. In some embodiments, the two or more CHIKV structural proteins are E2, E3, and C. In some embodiments, the two or more CHIKV structural proteins are E1, E2, E3, and C. In some embodiments, the two or more CHIKV structural proteins are E1, 6K, and E2. In some embodiments, the two or more CHIKV structural proteins are E2, 6K, and E3. In some embodiments, the two or more CHIKV structural proteins are E1, 6K, and E3. In some embodiments, the two or more CHIKV structural proteins are E1, E2, E3, 6K, and C. In some embodiments, the antigenic polypeptide comprises the CHIKV structural polyprotein comprising C, E3, E2, 6K, and E1. In some embodiments, the antigenic polypeptide is a fragment or epitope of two or more CHIKV structural proteins or a fragment or epitope of the polyprotein.

[0083] In some embodiments, at least one RNA polynucleotide is encoded by at least one nucleic acid sequence identified by any one of SEQ ID NO: 376-388 (Table 47) and homologs having at least 80% identity with a nucleic acid sequence identified by any one of SEQ ID NO: 376-388 (Table 47). In some embodiments, at least one RNA polynucleotide is encoded by at least one nucleic acid sequence identified by any one of SEQ ID NO: 376-388 (Table 47) and homologs having at least 90% (90%, 91%, 92%, 93%, 94%, 95%, 96%, 97%, 98%, 99%, 99.8% or 99.9%) identity with a nucleic acid sequence identified by any one of SEQ ID NO: 376-388 (Table 47). In some embodiments, at least one RNA polynucleotide is encoded by at least one fragment of a nucleic acid sequence identified by any one of SEQ ID NO: 376-388 (Table 47).

[0084] In some embodiments, at least one RNA polynucleotide comprises at least one nucleic acid sequence identified by any one of SEQ ID NO: 389-401 (Table 47) and homologs having at least 80% identity with a nucleic acid sequence identified by any one of SEQ ID NO: 389-401 (Table 47). In some embodiments, at least one RNA polynucleotide comprises at least one nucleic acid sequence identified by any one of SEQ ID NO: 389-401 (Table 47) and homologs having at least 90% (90%, 91%, 92%, 93%, 94%, 95%, 96%, 97%, 98%, 99%, 99.8% or 99.9%) identity with a nucleic acid sequence identified by any one of SEQ ID NO: 389-401 (Table 47). In some embodiments, at least one RNA polynucleotide comprises at least one fragment of a nucleic acid sequence identified by any one of SEQ ID NO: 389-401 (Table 47).

[0085] In some embodiments, the at least one RNA polynucleotide encodes at least one antigenic polypeptide having a sequence identified by any one of SEQ ID NO: 402-413 (Table 48). In some embodiments, the at least one RNA polynucleotide encodes at least one protein variant having at least 95% identity to an antigenic polypeptide having a sequence identified by any one of SEQ ID NO: 402-413 (Table 48). In some embodiments, at least one antigenic polypeptide has an amino acid sequence identified by any one of SEQ ID NO: 402-413 (Table 48). In some embodiments, at least one antigenic polypeptide has at least 95% identity to an antigenic polypeptide having a sequence identified by any one of SEQ ID NO: 402-413 (Table 48).

[0086] In some embodiments, an open reading frame of a RNA (e.g., mRNA) vaccine is codon-optimized. In some embodiments, at least one RNA polynucleotide encodes at least one antigenic polypeptide comprising an amino acid sequence identified by any one of SEQ ID NO: 13-17, 22-29, 44-47, 52-54, 59-64, 97-117, 156-222, 469, 259-291 or 402-413 and is codon optimized mRNA.

[0087] In some embodiments, a RNA (e.g., mRNA) vaccine further comprising an adjuvant.

[0088] Tables 3, 6, 11, 14, 17, 27, and 42 provide National Center for Biotechnology Information (NCBI) accession numbers of interest. It should be understood that the phrase “an amino acid sequence of Tables 3, 6, 11, 14, 17, 27, and 42” refers to an amino acid sequence identified by one or more NCBI accession numbers listed in Tables 3, 6, 11, 14, 17, 27, and 42. Each of the amino acid sequences, and variants having greater than 95% identity or greater than 98% identity to each of the amino acid sequences encompassed by the accession numbers of Tables 3, 6, 11, 14, 17, 27, and 42 are included within the constructs (polynucleotides/polypeptides) of the present disclosure.

[0089] In some embodiments, at least one mRNA polynucleotide is encoded by a nucleic acid comprising a sequence identified by any one of SEQ ID NO: 1-6, 18, 19, 30-34, 48, 49, 55, 56, 65-80, 118-136, 223-239 or 376-388 and having less than 80% identity to wild-type mRNA sequence. In some embodiments, at least one mRNA polynucleotide is encoded by a nucleic acid comprising a sequence identified by any one of SEQ ID NO: 1-6, 18, 19, 30-34, 48, 49, 55, 56, 65-80, 118-136, 223-239 or 376-388 and having less than 75%, 85% or 95% identity to a wild-type mRNA sequence. In some embodiments, at least one mRNA polynucleotide is encoded by nucleic acid comprising a sequence identified by any one of SEQ ID NO: 1-6, 18, 19, 30-34, 48, 49, 55, 56, 65-80, 118-136, 223-239 or 376-388 and having less than 50-80%, 60-80%, 40-80%, 30-80%, 70-80%, 75-80% or 78-80% identity to wild-type mRNA sequence. In some embodiments, at least one mRNA polynucleotide is encoded by a nucleic acid comprising a sequence identified by any one of SEQ ID NO: 1-6, 18, 19, 30-34, 48, 49, 55, 56, 65-80, 118-136, 223-239 or 376-388 and having less than 40-85%, 50-85%, 60-85%, 30-85%, 70-85%, 75-85% or 80-85% identity to wild-type mRNA sequence. In some embodiments, at least one mRNA polynucleotide is encoded by a nucleic acid comprising a sequence identified by any one of SEQ ID NO: 1-6, 18, 19, 30-34, 48, 49, 55, 56, 65-80, 118-136, 223-239 or 376-388 and having less than 40-90%, 50-90%, 60-90%, 30-90%, 70-90%, 75-90%, 80-90%, or 85-90% identity to wild-type mRNA sequence.

[0090] In some embodiments, at least one mRNA polynucleotide comprises a nucleic acid comprising a sequence identified by any one of SEQ ID NO: 7-12, 20-21, 35-39, 50-51, 57-58, 81-96, 137-155, 240-256, or 389-401 (with or without a signal sequence, 5′ UTR, 3′ UTR, and/or polyA tail) and having less than 80% identity to wild-type mRNA sequence. In some embodiments, at least one mRNA polynucleotide comprises a nucleic acid comprising a sequence identified by any one of SEQ ID NO: 7-12, 20-21, 35-39, 50-51, 57-58, 81-96, 137-155, 240-256, or 389-401 (with or without a signal sequence, 5′ UTR, 3′ UTR, and/or polyA tail) and having less than 75%, 85% or 95% identity to a wild-type mRNA sequence. In some embodiments, at least one mRNA polynucleotide comprises nucleic acid comprising a sequence identified by any one of SEQ ID NO: 7-12, 20-21, 35-39, 50-51, 57-58, 81-96, 137-155, 240-256, or 389-401 (with or without a signal sequence, 5′ UTR, 3′ UTR, and/or polyA tail) and having less than 50-80%, 60-80%, 40-80%, 30-80%, 70-80%, 75-80% or 78-80% identity to wild-type mRNA sequence. In some embodiments, at least one mRNA polynucleotide comprises a nucleic acid comprising a sequence identified by any one of SEQ ID NO: 7-12, 20-21, 35-39, 50-51, 57-58, 81-96, 137-155, 240-256, or 389-401 (with or without a signal sequence, 5′ UTR, 3′ UTR, and/or polyA tail) and having less than 40-85%, 50-85%, 60-85%, 30-85%, 70-85%, 75-85% or 80-85% identity to wild-type mRNA sequence. In some embodiments, at least one mRNA polynucleotide comprises a nucleic acid comprising a sequence identified by any one of SEQ ID NO: 7-12, 20-21, 35-39, 50-51, 57-58, 81-96, 137-155, 240-256, or 389-401 (with or without a signal sequence, 5′ UTR, 3′ UTR, and/or polyA tail) and having less than 40-90%, 50-90%, 60-90%, 30-90%, 70-90%, 75-90%, 80-90%, or 85-90% identity to wild-type mRNA sequence.

[0091] In some embodiments, at least one RNA polynucleotide encodes at least one antigenic polypeptide comprising an amino acid sequence identified by any one of SEQ ID NO: 13-17, 22-29, 44-47, 52-54, 59-64, 97-117, 156-222, 469, 259-291 or 402-413 and having at least 80% (e.g., 85%, 90%, 95%, 98%, 99%) identity to wild-type mRNA sequence, but does not include wild-type mRNA sequence.

[0092] In some embodiments, at least one RNA polynucleotide encodes at least one antigenic polypeptide comprising an amino acid sequence identified by any one of SEQ ID NO: 13-17, 22-29, 44-47, 52-54, 59-64, 97-117, 156-222, 469, 259-291 or 402-413 and has less than 95%, 90%, 85%, 80% or 75% identity to wild-type mRNA sequence. In some embodiments, at least one RNA polynucleotide encodes at least one antigenic polypeptide comprising an amino acid sequence identified by any one of SEQ ID NO: 13-17, 22-29, 44-47, 52-54, 59-64, 97-117, 156-222, 469, 259-291 or 402-413 and has 30-80%, 40-80%, 50-80%, 60-80%, 70-80%, 75-80% or 78-80%, 30-85%, 40-85%, 50-85%, 60-85%, 70-85%, 75-85% or 78-85%, 30-90%, 40-90%, 50-90%, 60-90%, 70-90%, 75-90%, 80-90% or 85-90% identity to wild-type mRNA sequence.

[0093] In some embodiments, at least one RNA polynucleotide encodes at least one antigenic polypeptide having at least 90%, at least 95%, at least 96%, at least 97%, at least 98%, or at least 99% identity to an amino acid sequence identified by any one of SEQ ID NO: 13-17, 22-29, 44-47, 52-54, 59-64, 97-117, 156-222, 469, 259-291 or 402-413. In some embodiments, at least one RNA polynucleotide encodes at least one antigenic polypeptide having 95-99% identity to an amino acid sequence identified by any one of SEQ ID NO: 13-17, 22-29, 44-47, 52-54, 59-64, 97-117, 156-222, 469, 259-291 or 402-413.

[0094] In some embodiments, at least one RNA polynucleotide encodes at least one antigenic polypeptide having at least 90%, at least 95%, at least 96%, at least 97%, at least 98%, or at least 99% identity to amino acid sequence identified by any one of SEQ ID NO: 13-17, 22-29, 44-47, 52-54, 59-64, 97-117, 156-222, 469, 259-291 or 402-413 and having membrane fusion activity. In some embodiments, at least one RNA polynucleotide encodes at least one antigenic polypeptide having 95-99% identity to amino acid sequence identified by any one of SEQ ID NO: 13-17, 22-29, 44-47, 52-54, 59-64, 97-117, 156-222, 469, 259-291 or 402-413 and having membrane fusion activity.

[0095] In some embodiments, at least one RNA polynucleotide encodes at least one antigenic polypeptide (e.g., at least one Malaria (e.g., P. falciparum, P. vivax, P. malariae and/or P. ovale), JEV, WNV, EEEV, VEEV, SINV, CHIKV, DENV, ZIKV and/or YFV antigenic polypeptide) that attaches to cell receptors.

[0096] In some embodiments, at least one RNA polynucleotide encodes at least one antigenic polypeptide (e.g., at least one Malaria (e.g., P. falciparum, P. vivax, P. malariae and/or P. ovale), JEV, WNV, EEEV, VEEV, SINV, CHIKV, DENV, ZIKV and/or YFV antigenic polypeptide) antigenic polypeptide) that causes fusion of viral and cellular membranes.

[0097] In some embodiments, at least one RNA polynucleotide encodes at least one antigenic polypeptide (e.g., at least one Malaria (e.g., P. falciparum, P. vivax, P. malariae and/or P. ovale), JEV, WNV, EEEV, VEEV, SINV, CHIKV, DENV, ZIKV and/or YFV antigenic polypeptide) that is responsible for binding of the virus to a cell being infected.

[0098] Some embodiments of the present disclosure provide a vaccine that includes at least one ribonucleic acid (RNA) (e.g., mRNA) polynucleotide having an open reading frame encoding at least one antigenic polypeptide (e.g., at least one Malaria (e.g., P. falciparum, P. vivax, P. malariae and/or P. ovale), JEV, WNV, EEEV, VEEV, SINV, CHIKV, DENV, ZIKV and/or YFV antigenic polypeptide), at least one 5′ terminal cap and at least one chemical modification, formulated within a lipid nanoparticle.

[0099] In some embodiments, a 5′ terminal cap is 7 mG(5′)ppp(5′)NlmpNp.

[0100] In some embodiments, at least one chemical modification is selected from pseudouridine, N1-methylpseudouridine, N1-ethylpseudouridine, 2-thiouridine, 4′-thiouridine, 5-methylcytosine, 5-methyluridine, 2-thio-1-methyl-1-deaza-pseudouridine, 2-thio-1-methyl-pseudouridine, 2-thio-5-aza-uridine, 2-thio-dihydropseudouridine, 2-thio-dihydrouridine, 2-thio-pseudouridine, 4-methoxy-2-thio-pseudouridine, 4-methoxy-pseudouridine, 4-thio-1-methyl-pseudouridine, 4-thio-pseudouridine, 5-aza-uridine, dihydropseudouridine, 5-methoxyuridine and 2′-O-methyl uridine. In some embodiments, the chemical modification is in the 5-position of the uracil. In some embodiments, the chemical modification is a N1-methylpseudouridine or a N1-methylpseudouridine.

[0101] In some embodiments, a lipid nanoparticle comprises a cationic lipid, a PEG-modified lipid, a sterol and a non-cationic lipid. In some embodiments, a cationic lipid is an ionizable cationic lipid and the non-cationic lipid is a neutral lipid, and the sterol is a cholesterol. In some embodiments, a cationic lipid is selected from the group consisting of 2,2-dilinoleyl-4-dimethylaminoethyl-[1,3]-dioxolane (DLin-KC2-DMA), dilinoleyl-methyl-4-dimethylaminobutyrate (DLin-MC3-DMA), di((Z)-non-2-en-1-yl) 9-((4-(dimethylamino) butanoyl)oxy) heptadecanedioate (L319), (12Z,15Z)—N,N-dimethyl-2-nonylhenicosa-12,15-dien-1-amine (L608), and N,N-dimethyl-1-[(1S,2R)-2-octylcyclopropyl]heptadecan-8-amine (L530).

[0102] In some embodiments, the lipid is

[chemical structure]

[0103] In some embodiments, the lipid is

[chemical structure]

[0104] In some embodiments, a lipid nanoparticle comprises compounds of Formula (I) and/or Formula (II), discussed below.

[0105] In some embodiments, a lipid nanoparticle comprises Compounds 3, 18, 20, 25, 26, 29, 30, 60, 108-112, or 122, as discussed below.

[0106] Some embodiments of the present disclosure provide a vaccine that includes at least one RNA (e.g., mRNA) polynucleotide having an open reading frame encoding at least one antigenic polypeptide (e.g., at least one Malaria (e.g., P. falciparum, P. vivax, P. malariae and/or P. ovale), JEV, WNV, EEEV, VEEV, SINV, CHIKV, DENV, ZIKV and/or YFV antigenic polypeptide), wherein at least 80% (e.g., 85%, 90%, 95%, 98%, 99%) of the uracil in the open reading frame have a chemical modification, optionally wherein the vaccine is formulated in a lipid nanoparticle (e.g., a lipid nanoparticle comprises a cationic lipid, a PEG-modified lipid, a sterol and a non-cationic lipid).

[0107] In some embodiments, 100% of the uracil in the open reading frame have a chemical modification. In some embodiments, a chemical modification is in the 5-position of the uracil. In some embodiments, a chemical modification is a N1-methyl pseudouridine. In some embodiments, 100% of the uracil in the open reading frame have a N1-methyl pseudouridine in the 5-position of the uracil.

[0108] In some embodiments, an open reading frame of a RNA (e.g., mRNA) polynucleotide encodes at least two antigenic polypeptides (e.g., at least one Malaria (e.g., P. falciparum, P. vivax, P. malariae and/or P. ovale), JEV, WNV, EEEV, VEEV, SINV, CHIKV, DENV, ZIKV and/or YFV antigenic polypeptide). In some embodiments, the open reading frame encodes at least five or at least ten antigenic polypeptides. In some embodiments, the open reading frame encodes at least 100 antigenic polypeptides. In some embodiments, the open reading frame encodes 2-100 antigenic polypeptides.

[0109] In some embodiments, a vaccine comprises at least two RNA (e.g., mRNA) polynucleotides, each having an open reading frame encoding at least one antigenic polypeptide (e.g., at least one Malaria (e.g., P. falciparum, P. vivax, P. malariae and/or P. ovale), JEV, WNV, EEEV, VEEV, SINV, CHIKV, DENV, ZIKV and/or YFV antigenic polypeptide). In some embodiments, the vaccine comprises at least five or at least ten RNA (e.g., mRNA) polynucleotides, each having an open reading frame encoding at least one antigenic polypeptide or an immunogenic fragment thereof. In some embodiments, the vaccine comprises at least 100 RNA (e.g., mRNA) polynucleotides, each having an open reading frame encoding at least one antigenic polypeptide. In some embodiments, the vaccine comprises 2-100 RNA (e.g., mRNA) polynucleotides, each having an open reading frame encoding at least one antigenic polypeptide.

[0110] In some embodiments, at least one antigenic polypeptide (e.g., at least one Malaria (e.g., P. falciparum, P. vivax, P. malariae and/or P. ovale), JEV, WNV, EEEV, VEEV, SINV, CHIKV, DENV, ZIKV and/or YFV antigenic polypeptide) is fused to a signal peptide. In some embodiments, the signal peptide is selected from: a HuIgGk signal peptide (METPAQLLFLLLLWLPDTTG; SEQ ID NO: 423); IgE heavy chain epsilon-1 signal peptide (MDWTWILFLVAAATRVHS; SEQ ID NO: 424); Japanese encephalitis PRM signal sequence (MLGSNSGQRVVFTILLLLVAPAYS; SEQ ID NO: 425), VSINVg protein signal sequence (MKCLLYLAFLFIGVNCA; SEQ ID NO: 426) and Japanese encephalitis JEV signal sequence (MWLVSLAIVTACAGA; SEQ ID NO: 427).

[0111] In some embodiments, the signal peptide is fused to the N-terminus of at least one antigenic polypeptide. In some embodiments, a signal peptide is fused to the C-terminus of at least one antigenic polypeptide.

[0112] In some embodiments, at least one antigenic polypeptide (e.g., at least one Malaria (e.g., P. falciparum, P. vivax, P. malariae and/or P. ovale), JEV, WNV, EEEV, VEEV, SINV, CHIKV, DENV, ZIKV and/or YFV antigenic polypeptide) comprises a mutated N-linked glycosylation site.

[0113] Also provided herein is a RNA (e.g., mRNA) vaccine of any one of the foregoing paragraphs (e.g., at least one Malaria (e.g., P. falciparum, P. vivax, P. malariae and/or P. ovale), JEV, WNV, EEEV, VEEV, SINV, CHIKV, DENV, ZIKV and/or YFV antigenic polypeptide), formulated in a nanoparticle (e.g., a lipid nanoparticle).

[0114] In some embodiments, the nanoparticle has a mean diameter of 50-200 nm. In some embodiments, the nanoparticle is a lipid nanoparticle.

[0115] In some embodiments, a lipid nanoparticle comprises compounds of Formula (I) and/or Formula (II), discussed below.

[0116] In some embodiments, a tropical disease RNA (e.g., mRNA) vaccine is formulated in a lipid nanoparticle that comprises a compound selected from Compounds 3, 18, 20, 25, 26, 29, 30, 60, 108-112 and 122, described below.

[0117] In some embodiments, the nanoparticle has a polydispersity value of less than 0.4 (e.g., less than 0.3, 0.2 or 0.1).

[0118] In some embodiments, the nanoparticle has a net neutral charge at a neutral pH value.

[0119] In some embodiments, the RNA (e.g., mRNA) vaccine is multivalent.

[0120] Some embodiments of the present disclosure provide methods of inducing an antigen specific immune response in a subject, comprising administering to the subject any of the RNA (e.g., mRNA) vaccine as provided herein in an amount effective to produce an antigen-specific immune response. In some embodiments, the RNA (e.g., mRNA) vaccine is a Malaria (e.g., P. falciparum, P. vivax, P. malariae and/or P. ovale), JEV, WNV, EEEV, VEEV, SINV, CHIKV, DENV, ZIKV and/or YFV vaccine. In some embodiments, the RNA (e.g., mRNA) vaccine is a combination vaccine comprising a combination of Malaria (e.g., P. falciparum, P. vivax, P. malariae and/or P. ovale) vaccine, JEV vaccine, WNV vaccine, EEEV vaccine, SINV vaccine, CHIKV vaccine, DENV vaccine, ZIKV vaccine and/or YFV vaccine.

[0121] In some embodiments, an antigen-specific immune response comprises a T cell response or a B cell response.

[0122] In some embodiments, a method of producing an antigen-specific immune response comprises administering to a subject a single dose (no booster dose) of a RNA (e.g., mRNA) vaccine of the present disclosure. In some embodiments, the RNA (e.g., mRNA) vaccine is a Malaria (e.g., P. falciparum, P. vivax, P. malariae and/or P. ovale) vaccine, JEV vaccine, WNV vaccine, EEEV vaccine, SINV vaccine, CHIKV vaccine, DENV vaccine, ZIKV vaccine and/or YFV vaccine. In some embodiments, the RNA (e.g., mRNA) vaccine is a combination vaccine comprising a combination of any two or more of the foregoing vaccines.

[0123] In some embodiments, a method further comprises administering to the subject a second (booster) dose of a RNA (e.g., mRNA) vaccine. Additional doses of a RNA (e.g., mRNA) vaccine may be administered.

[0124] In some embodiments, the subjects exhibit a seroconversion rate of at least 80% (e.g., at least 85%, at least 90%, or at least 95%) following the first dose or the second (booster) dose of the vaccine. Seroconversion is the time period during which a specific antibody develops and becomes detectable in the blood. After seroconversion has occurred, a virus can be detected in blood tests for the antibody. During an infection or immunization, antigens enter the blood, and the immune system begins to produce antibodies in response. Before seroconversion, the antigen itself may or may not be detectable, but antibodies are considered absent. During seroconversion, antibodies are present but not yet detectable. Any time after seroconversion, the antibodies can be detected in the blood, indicating a prior or current infection.

[0125] In some embodiments, a RNA (e.g., mRNA) vaccine is administered to a subject by intradermal, intramuscular injection, or by intranasal administration.

[0126] Some embodiments of the present disclosure provide methods of inducing an antigen specific immune response in a subject, including administering to a subject a RNA (e.g., mRNA) vaccine in an effective amount to produce an antigen specific immune response in a subject. Antigen-specific immune responses in a subject may be determined, in some embodiments, by assaying for antibody titer (for titer of an antibody that binds to a Malaria (e.g., P. falciparum, P. vivax, P. malariae and/or P. ovale), JEV, WNV, EEEV, VEEV, SINV, CHIKV, DENV, ZIKV and/or YFV antigenic polypeptide) following administration to the subject of any of the RNA (e.g., mRNA) vaccines of the present disclosure. In some embodiments, the anti-antigenic polypeptide antibody titer produced in the subject is increased by at least 1 log relative to a control. In some embodiments, the anti-antigenic polypeptide antibody titer produced in the subject is increased by 1-3 log relative to a control.

[0127] In some embodiments, the anti-antigenic polypeptide antibody titer produced in a subject is increased at least 2 times relative to a control. In some embodiments, the anti-antigenic polypeptide antibody titer produced in the subject is increased at least 5 times relative to a control. In some embodiments, the anti-antigenic polypeptide antibody titer produced in the subject is increased at least 10 times relative to a control. In some embodiments, the anti-antigenic polypeptide antibody titer produced in the subject is increased 2-10 times relative to a control.

[0128] In some embodiments, the control is an anti-antigenic polypeptide antibody titer produced in a subject who has not been administered a RNA (e.g., mRNA) vaccine of the present disclosure. In some embodiments, the control is an anti-antigenic polypeptide antibody titer produced in a subject who has been administered a live attenuated or inactivated Malaria (e.g., P. falciparum, P. vivax, P. malariae and/or P. ovale), JEV, WNV, EEEV, VEEV, SINV, CHIKV, DENV, ZIKV and/or YFV vaccine (see, e.g., Ren J. et al. J of Gen. Virol. 2015; 96:1515-1520), or wherein the control is an anti-antigenic polypeptide antibody titer produced in a subject who has been administered a recombinant or purified Malaria (e.g., P. falciparum, P. vivax, P. malariae and/or P. ovale), JEV, WNV, EEEV, VEEV, SINV, CHIKV, DENV, ZIKV and/or YFV protein vaccine. In some embodiments, the control is an anti-antigenic polypeptide antibody titer produced in a subject who has been administered a Malaria (e.g., P. falciparum, P. vivax, P. malariae and/or P. ovale), JEV, WNV, EEEV, VEEV, SINV, CHIKV, DENV, ZIKV and/or YFV virus-like particle (VLP) vaccine (see, e.g., Cox R G et al., J Virol. 2014 June; 88 (11): 6368-6379).

[0129] A RNA (e.g., mRNA) vaccine of the present disclosure is administered to a subject in an effective amount (an amount effective to induce an immune response). In some embodiments, the effective amount is a dose equivalent to an at least 2-fold, at least 4-fold, at least 10-fold, at least 100-fold, at least 1000-fold reduction in the standard of care dose of a recombinant Malaria (e.g., P. falciparum, P. vivax, P. malariae and/or P. ovale), JEV, WNV, EEEV, VEEV, SINV, CHIKV, DENV, ZIKV and/or YFV protein vaccine, wherein the anti-antigenic polypeptide antibody titer produced in the subject is equivalent to an anti-antigenic polypeptide antibody titer produced in a control subject administered the standard of care dose of a recombinant Malaria (e.g., P. falciparum, P. vivax, P. malariae and/or P. ovale), JEV, WNV, EEEV, VEEV, SINV, CHIKV, DENV, ZIKV and/or YFV protein vaccine, a purified Malaria (e.g., P. falciparum, P. vivax, P. malariae and/or P. ovale), JEV, WNV, EEEV, VEEV, SINV, CHIKV, DENV, ZIKV and/or YFV protein vaccine, a live attenuated Malaria (e.g., P. falciparum, P. vivax, P. malariae and/or P. ovale), JEV, WNV, EEEV, VEEV, SINV, CHIKV, DENV, ZIKV and/or YFV vaccine, an inactivated Malaria (e.g., P. falciparum, P. vivax, P. malariae and/or P. ovale), JEV, WNV, EEEV, VEEV, SINV, CHIKV, DENV, ZIKV and/or YFV vaccine, or a Malaria (e.g., P. falciparum, P. vivax, P. Malariae and/or P. ovale), JEV, WNV, EEEV, VEEV, SINV, CHIKV, DENV, ZIKV and/or YFV VLP vaccine. In some embodiments, the effective amount is a dose equivalent to 2-1000-fold reduction in the standard of care dose of a recombinant Malaria (e.g., P. falciparum, P. vivax, P. malariae and/or P. ovale), JEV, WNV, EEEV, VEEV, SINV, CHIKV, DENV, ZIKV and/or YFV protein vaccine, wherein the anti-antigenic polypeptide antibody titer produced in the subject is equivalent to an anti-antigenic polypeptide antibody titer produced in a control subject administered the standard of care dose of a recombinant Malaria (e.g., P. falciparum, P. vivax, P. malariae and/or P. ovale), JEV, WNV, EEEV, VEEV, SINV, CHIKV, DENV, ZIKV and/or YFV protein vaccine, a purified Malaria (e.g., P. falciparum, P. vivax, P. malariae and/or P. ovale), JEV, WNV, EEEV, VEEV, SINV, CHIKV, DENV, ZIKV and/or YFV protein vaccine, a live attenuated Malaria (e.g., P. falciparum, P. vivax, P. malariae and/or P. ovale), JEV, WNV, EEEV, VEEV, SINV, CHIKV, DENV, ZIKV and/or YFV vaccine, an inactivated Malaria (e.g., P. falciparum, P. vivax, P. malariae and/or P. ovale), JEV, WNV, EEEV, VEEV, SINV, CHIKV, DENV, ZIKV and/or YFV vaccine, or a Malaria (e.g., P. falciparum, P. vivax, P. malariae and/or P. ovale), JEV, WNV, EEEV, VEEV, SINV, CHIKV, DENV, ZIKV and/or YFV VLP vaccine.

[0130] In some embodiments, the control is an anti-antigenic polypeptide antibody titer produced in a subject who has been administered a virus-like particle (VLP) vaccine comprising structural proteins of Malaria (e.g., P. falciparum, P. vivax, P. malariae and/or P. ovale), JEV, WNV, EEEV, VEEV, SINV, CHIKV, DENV, ZIKV and/or YFV.

[0131] In some embodiments, the RNA (e.g., mRNA) vaccine is formulated in an effective amount to produce an antigen specific immune response in a subject.

[0132] In some embodiments, the effective amount is a total dose of 25 μg to 1000 μg, or 50 μg to 1000 μg. In some embodiments, the effective amount is a total dose of 100 μg. In some embodiments, the effective amount is a dose of 25 μg administered to the subject a total of two times. In some embodiments, the effective amount is a dose of 100 μg administered to the subject a total of two times. In some embodiments, the effective amount is a dose of 400 μg administered to the subject a total of two times. In some embodiments, the effective amount is a dose of 500 μg administered to the subject a total of two times.

[0133] In some embodiments, the efficacy (or effectiveness) of a RNA (e.g., mRNA) vaccine is greater than 60%. In some embodiments, the RNA (e.g., mRNA) polynucleotide of the vaccine is at least one of Malaria (e.g., P. falciparum, P. vivax, P. malariae and/or P. ovale), JEV, WNV, EEEV, VEEV, SINV, CHIKV, DENV, ZIKV and/or YFV antigenic polypeptide.

[0134] Vaccine efficacy may be assessed using standard analyses (see, e.g., Weinberg et al., J Infect Dis. 2010 Jun. 1; 201 (11): 1607-10). For example, vaccine efficacy may be measured by double-blind, randomized, clinical controlled trials. Vaccine efficacy may be expressed as a proportionate reduction in disease attack rate (AR) between the unvaccinated (ARU) and vaccinated (ARV) study cohorts and can be calculated from the relative risk (RR) of disease among the vaccinated group with use of the following formulas:

$$Efficacy = ( A R U - A RV ) / ARU \times 100 ; and$$

$$Efficacy = ( 1 - RR ) \times 100.$$

[0135] Likewise, vaccine effectiveness may be assessed using standard analyses (see, e.g., Weinberg et al., J Infect Dis. 2010 Jun. 1; 201 (11): 1607-10). Vaccine effectiveness is an assessment of how a vaccine (which may have already proven to have high vaccine efficacy) reduces disease in a population. This measure can assess the net balance of benefits and adverse effects of a vaccination program, not just the vaccine itself, under natural field conditions rather than in a controlled clinical trial. Vaccine effectiveness is proportional to vaccine efficacy (potency) but is also affected by how well target groups in the population are immunized, as well as by other non-vaccine-related factors that influence the ‘real-world’ outcomes of hospitalizations, ambulatory visits, or costs. For example, a retrospective case control analysis may be used, in which the rates of vaccination among a set of infected cases and appropriate controls are compared. Vaccine effectiveness may be expressed as a rate difference, with use of the odds ratio (OR) for developing infection despite vaccination:

$$Effectiveness = ( 1 - OR ) \times 100.$$

[0136] In some embodiments, the efficacy (or effectiveness) of a RNA (e.g., mRNA) vaccine is at least 65%, at least 70%, at least 75%, at least 80%, at least 85%, or at least 90%.

[0137] In some embodiments, the vaccine immunizes the subject against Malaria (e.g., P. falciparum, P. vivax, P. malariae and/or P. ovale), JEV, WNV, EEEV, VEEV, SINV, CHIKV, DENV, ZIKV and/or YFV for up to 2 years. In some embodiments, the vaccine immunizes the subject against Malaria (e.g., P. falciparum, P. vivax, P. malariae and/or P. ovale), JEV, WNV, EEEV, VEEV, SINV, CHIKV, DENV, ZIKV and/or YFV for more than 2 years, more than 3 years, more than 4 years, or for 5-10 years.

[0138] In some embodiments, the subject is about 5 years old or younger. For example, the subject may be between the ages of about 1 year and about 5 years (e.g., about 1, 2, 3, 4 or 5 years), or between the ages of about 6 months and about 1 year (e.g., about 6, 7, 8, 9, 10, 11 or 12 months). In some embodiments, the subject is about 12 months or younger (e.g., 12, 11, 10, 9, 8, 7, 6, 5, 4, 3, 2 months or 1 month). In some embodiments, the subject is about 6 months or younger.

[0139] In some embodiments, the subject was born full term (e.g., about 37-42 weeks). In some embodiments, the subject was born prematurely, for example, at about 36 weeks of gestation or earlier (e.g., about 36, 35, 34, 33, 32, 31, 30, 29, 28, 27, 26 or 25 weeks). For example, the subject may have been born at about 32 weeks of gestation or earlier. In some embodiments, the subject was born prematurely between about 32 weeks and about 36 weeks of gestation. In such subjects, a RNA (e.g., mRNA) vaccine may be administered later in life, for example, at the age of about 6 months to about 5 years, or older.

[0140] In some embodiments, the subject is an adult between the ages of about 20 years and about 50 years (e.g., about 20, 25, 30, 35, 40, 45 or 50 years old).

[0141] In some embodiments, the subject is an elderly subject about 60 years old, about 70 years old, or older (e.g., about 60, 65, 70, 75, 80, 85 or 90 years old).

[0142] In some embodiments, the subject has been exposed to Malaria (e.g., P. falciparum, P. vivax, P. malariae and/or P. ovale), JEV, WNV, EEEV, VEEV, SINV, CHIKV, DENV, ZIKV and/or YFV (e.g., C. trachomatis); the subject is infected with Malaria (e.g., P. falciparum, P. vivax, P. malariae and/or P. ovale), JEV, WNV, EEEV, VEEV, SINV, CHIKV, DENV, ZIKV and/or YFV (e.g., C. trachomatis); or subject is at risk of infection by Malaria (e.g., P. falciparum, P. vivax, P. malariae and/or P. ovale), JEV, WNV, EEEV, VEEV, SINV, CHIKV, DENV, ZIKV and/or YFV (e.g., C. trachomatis).

[0143] In some embodiments, the subject is immunocompromised (has an impaired immune system, e.g., has an immune disorder or autoimmune disorder).

[0144] In some embodiments the nucleic acid vaccines described herein are chemically modified. In other embodiments the nucleic acid vaccines are unmodified.

[0145] Yet other aspects provide compositions for and methods of vaccinating a subject comprising administering to the subject a nucleic acid vaccine comprising one or more RNA polynucleotides having an open reading frame encoding a first virus antigenic polypeptide, wherein the RNA polynucleotide does not include a stabilization element, and wherein an adjuvant is not coformulated or co-administered with the vaccine.

[0146] In other aspects the invention is a composition for or method of vaccinating a subject comprising administering to the subject a nucleic acid vaccine comprising one or more RNA polynucleotides having an open reading frame encoding a first antigenic polypeptide wherein a dosage of between 10 μg/kg and 400 μg/kg of the nucleic acid vaccine is administered to the subject. In some embodiments the dosage of the RNA polynucleotide is 1-5 μg, 5-10 μg, 10-15 μg, 15-20 μg, 10-25 μg, 20-25 μg, 20-50 μg, 30-50 μg, 40-50 μg, 40-60 μg, 60-80 μg, 60-100μ, 50-100μ, 80-120μ, 40-120μ, 40-150μ, 50-150μ, 50-200μ, 80-200μ g, 100-200 μg, 120-250 μg, 150-250 μg, 180-280 μg, 200-300 μg, 50-300 μg, 80-300 μg, 100-300 μg, 40-300 μg, 50-350 μg, 100-350 μg, 200-350 μg, 300-350 μg, 320-400 μg, 40-380 μg, 40-100 μg, 100-400 μg, 200-400 μg, or 300-400 μg per dose. In some embodiments, the nucleic acid vaccine is administered to the subject by intradermal or intramuscular injection. In some embodiments, the nucleic acid vaccine is administered to the subject on day zero. In some embodiments, a second dose of the nucleic acid vaccine is administered to the subject on day twenty one.

[0147] In some embodiments, a dosage of 25 micrograms of the RNA polynucleotide is included in the nucleic acid vaccine administered to the subject. In some embodiments, a dosage of 100 micrograms of the RNA polynucleotide is included in the nucleic acid vaccine administered to the subject. In some embodiments, a dosage of 50 micrograms of the RNA polynucleotide is included in the nucleic acid vaccine administered to the subject. In some embodiments, a dosage of 75 micrograms of the RNA polynucleotide is included in the nucleic acid vaccine administered to the subject. In some embodiments, a dosage of 150 micrograms of the RNA polynucleotide is included in the nucleic acid vaccine administered to the subject. In some embodiments, a dosage of 400 micrograms of the RNA polynucleotide is included in the nucleic acid vaccine administered to the subject. In some embodiments, a dosage of 200 micrograms of the RNA polynucleotide is included in the nucleic acid vaccine administered to the subject. In some embodiments, the RNA polynucleotide accumulates at a 100 fold higher level in the local lymph node in comparison with the distal lymph node. In other embodiments the nucleic acid vaccine is chemically modified and in other embodiments the nucleic acid vaccine is not chemically modified.

[0148] Aspects of the invention provide a nucleic acid vaccine comprising one or more RNA polynucleotides having an open reading frame encoding a first antigenic polypeptide, wherein the RNA polynucleotide does not include a stabilization element, and a pharmaceutically acceptable carrier or excipient, wherein an adjuvant is not included in the vaccine. In some embodiments, the stabilization element is a histone stem-loop. In some embodiments, the stabilization element is a nucleic acid sequence having increased GC content relative to wild type sequence.

[0149] Aspects of the invention provide nucleic acid vaccines comprising one or more RNA polynucleotides having an open reading frame encoding a first antigenic polypeptide, wherein the RNA polynucleotide is present in the formulation for in vivo administration to a host, which confers an antibody titer superior to the criterion for seroprotection for the first antigen for an acceptable percentage of human subjects. In some embodiments, the antibody titer produced by the mRNA vaccines of the invention is a neutralizing antibody titer. In some embodiments the neutralizing antibody titer is greater than a protein vaccine. In other embodiments the neutralizing antibody titer produced by the mRNA vaccines of the invention is greater than an adjuvanted protein vaccine. In yet other embodiments the neutralizing antibody titer produced by the mRNA vaccines of the invention is 1,000-10,000, 1,200-10,000, 1,400-10,000, 1,500-10,000, 1,000-5,000, 1,000-4,000, 1,800-10,000, 2000-10,000, 2,000-5,000, 2,000-3,000, 2,000-4,000, 3,000-5,000, 3,000-4,000, or 2,000-2,500. A neutralization titer is typically expressed as the highest serum dilution required to achieve a 50% reduction in the number of plaques.

[0150] Also provided are nucleic acid vaccines comprising one or more RNA polynucleotides having an open reading frame encoding a first antigenic polypeptide, wherein the RNA polynucleotide is present in a formulation for in vivo administration to a host for eliciting a longer lasting high antibody titer than an antibody titer elicited by an mRNA vaccine having a stabilizing element or formulated with an adjuvant and encoding the first antigenic polypeptide. In some embodiments, the RNA polynucleotide is formulated to produce neutralizing antibodies within one week of a single administration. In some embodiments, the adjuvant is selected from a cationic peptide and an immunostimulatory nucleic acid. In some embodiments, the cationic peptide is protamine.

[0151] Aspects provide nucleic acid vaccines comprising one or more RNA polynucleotides having an open reading frame comprising at least one chemical modification or optionally no modified nucleotides, the open reading frame encoding a first antigenic polypeptide, wherein the RNA polynucleotide is present in the formulation for in vivo administration to a host such that the level of antigen expression in the host significantly exceeds a level of antigen expression produced by an mRNA vaccine having a stabilizing element or formulated with an adjuvant and encoding the first antigenic polypeptide.

[0152] Other aspects provide nucleic acid vaccines comprising one or more RNA polynucleotides having an open reading frame comprising at least one chemical modification or optionally no modified nucleotides, the open reading frame encoding a first antigenic polypeptide, wherein the vaccine has at least 10 fold less RNA polynucleotide than is required for an unmodified mRNA vaccine to produce an equivalent antibody titer. In some embodiments, the RNA polynucleotide is present in a dosage of 25-100 micrograms.

[0153] Aspects of the invention also provide a unit of use vaccine, comprising between 10 μg and 400 μg of one or more RNA polynucleotides having an open reading frame comprising at least one chemical modification or optionally no modified nucleotides, the open reading frame encoding a first antigenic polypeptide, and a pharmaceutically acceptable carrier or excipient, formulated for delivery to a human subject. In some embodiments, the vaccine further comprises a cationic lipid nanoparticle.

[0154] Aspects of the invention provide methods of creating, maintaining or restoring antigenic memory to a virus strain in an individual or population of individuals comprising administering to said individual or population an antigenic memory booster nucleic acid vaccine comprising (a) at least one RNA polynucleotide, said polynucleotide comprising at least one chemical modification or optionally no modified nucleotides and two or more codon-optimized open reading frames, said open reading frames encoding a set of reference antigenic polypeptides, and (b) optionally a pharmaceutically acceptable carrier or excipient. In some embodiments, the vaccine is administered to the individual via a route selected from the group consisting of intramuscular administration, intradermal administration and subcutaneous administration. In some embodiments, the administering step comprises contacting a muscle tissue of the subject with a device suitable for injection of the composition. In some embodiments, the administering step comprises contacting a muscle tissue of the subject with a device suitable for injection of the composition in combination with electroporation.

[0155] Aspects of the invention provide methods of vaccinating a subject comprising administering to the subject a single dosage of between 25 μg/kg and 400 μg/kg of a nucleic acid vaccine comprising one or more RNA polynucleotides having an open reading frame encoding a first antigenic polypeptide in an effective amount to vaccinate the subject.

[0156] Other aspects provide nucleic acid vaccines comprising one or more RNA polynucleotides having an open reading frame comprising at least one chemical modification, the open reading frame encoding a first antigenic polypeptide, wherein the vaccine has at least 10 fold less RNA polynucleotide than is required for an unmodified mRNA vaccine to produce an equivalent antibody titer. In some embodiments, the RNA polynucleotide is present in a dosage of 25-100 micrograms.

[0157] Other aspects provide nucleic acid vaccines comprising an LNP formulated RNA polynucleotide having an open reading frame comprising no nucleotide modifications (unmodified), the open reading frame encoding a first antigenic polypeptide, wherein the vaccine has at least 10 fold less RNA polynucleotide than is required for an unmodified mRNA vaccine not formulated in a LNP to produce an equivalent antibody titer. In some embodiments, the RNA polynucleotide is present in a dosage of 25-100 micrograms.

[0158] The data presented in the Examples demonstrate significant enhanced immune responses using the formulations of the invention. Both chemically modified and unmodified RNA vaccines are useful according to the invention. Surprisingly, in contrast to prior art reports that it was preferable to use chemically unmodified mRNA formulated in a carrier for the production of vaccines, it is described herein that chemically modified mRNA-LNP vaccines required a much lower effective mRNA dose than unmodified mRNA, i.e., tenfold less than unmodified mRNA when formulated in carriers other than LNP. Both the chemically modified and unmodified RNA vaccines of the invention produce better immune responses than mRNA vaccines formulated in a different lipid carrier.

[0159] In other aspects the invention encompasses a method of treating an elderly subject age 60 years or older comprising administering to the subject a nucleic acid vaccine comprising one or more RNA polynucleotides having an open reading frame encoding a virus antigenic polypeptide in an effective amount to vaccinate the subject.

[0160] In other aspects the invention encompasses a method of treating a young subject age 17 years or younger comprising administering to the subject a nucleic acid vaccine comprising one or more RNA polynucleotides having an open reading frame encoding a virus antigenic polypeptide in an effective amount to vaccinate the subject.

[0161] In other aspects the invention encompasses a method of treating an adult subject comprising administering to the subject a nucleic acid vaccine comprising one or more RNA polynucleotides having an open reading frame encoding a virus antigenic polypeptide in an effective amount to vaccinate the subject.

[0162] In some aspects the invention is a method of vaccinating a subject with a combination vaccine including at least two nucleic acid sequences encoding antigens wherein the dosage for the vaccine is a combined therapeutic dosage wherein the dosage of each individual nucleic acid encoding an antigen is a sub therapeutic dosage. In some embodiments, the combined dosage is 25 micrograms of the RNA polynucleotide in the nucleic acid vaccine administered to the subject. In some embodiments, the combined dosage is 100 micrograms of the RNA polynucleotide in the nucleic acid vaccine administered to the subject. In some embodiments the combined dosage is 50 micrograms of the RNA polynucleotide in the nucleic acid vaccine administered to the subject. In some embodiments, the combined dosage is 75 micrograms of the RNA polynucleotide in the nucleic acid vaccine administered to the subject. In some embodiments, the combined dosage is 150 micrograms of the RNA polynucleotide in the nucleic acid vaccine administered to the subject. In some embodiments, the combined dosage is 400 micrograms of the RNA polynucleotide in the nucleic acid vaccine administered to the subject. In some embodiments, the sub therapeutic dosage of each individual nucleic acid encoding an antigen is 1, 2, 3, 4, 5, 6, 7, 8, 9, 10, 11, 12, 13, 14, 15, 16, 17, 18, 19, or 20 micrograms. In other embodiments the nucleic acid vaccine is chemically modified and in other embodiments the nucleic acid vaccine is not chemically modified.

[0163] The RNA polynucleotide is one of SEQ ID NO: 1-12, 18-21, 30-39, 48-51, 55-58, 56, 65-96, 118-155, 223-256 or 376-401 and includes at least one chemical modification. In other embodiments the RNA polynucleotide is one of SEQ ID NO: 1-12, 18-21, 30-39, 48-51, 55-58, 56, 65-96, 118-155, 223-256 or 376-401 and does not include any nucleotide modifications, or is unmodified. In yet other embodiments the at least one RNA polynucleotide encodes an antigenic protein of any of SEQ ID NO: 13-17, 22-29, 44-47, 52-54, 59-64, 97-117, 156-222, 469, 259-291 or 402-413 and includes at least one chemical modification. In other embodiments the RNA polynucleotide encodes an antigenic protein of any of SEQ ID NO: 13-17, 22-29, 44-47, 52-54, 59-64, 97-117, 156-222, 469, 259-291 or 402-413 and does not include any nucleotide modifications, or is unmodified.

[0164] In preferred aspects, vaccines of the invention (e.g., LNP-encapsulated mRNA vaccines) produce prophylactically- and/or therapeutically-efficacious levels, concentrations and/or titers of antigen-specific antibodies in the blood or serum of a vaccinated subject. As defined herein, the term antibody titer refers to the amount of antigen-specific antibody produces in s subject, e.g., a human subject. In exemplary embodiments, antibody titer is expressed as the inverse of the greatest dilution (in a serial dilution) that still gives a positive result. In exemplary embodiments, antibody titer is determined or measured by enzyme-linked immunosorbent assay (ELISA). In exemplary embodiments, antibody titer is determined or measured by neutralization assay, e.g., by microneutralization assay. In certain aspects, antibody titer measurement is expressed as a ratio, such as 1:40, 1:100, etc.

[0165] In exemplary embodiments of the invention, an efficacious vaccine produces an antibody titer of greater than 1:40, greater that 1:100, greater than 1:400, greater than 1:1000, greater than 1:2000, greater than 1:3000, greater than 1:4000, greater than 1:500, greater than 1:6000, greater than 1:7500, greater than 1:10000. In exemplary embodiments, the antibody titer is produced or reached by 10 days following vaccination, by 20 days following vaccination, by 30 days following vaccination, by 40 days following vaccination, or by 50 or more days following vaccination. In exemplary embodiments, the titer is produced or reached following a single dose of vaccine administered to the subject. In other embodiments, the titer is produced or reached following multiple doses, e.g., following a first and a second dose (e.g., a booster dose.)

[0166] In exemplary aspects of the invention, antigen-specific antibodies are measured in units of μg/ml or are measured in units of IU/L (International Units per liter) or mIU/ml (milli International Units per ml). In exemplary embodiments of the invention, an efficacious vaccine produces >0.5 μg/ml, >0.1 μg/ml, >0.2 μg/ml, >0.35 μg/ml, >0.5 μg/ml, >1 μg/ml, >2 μg/ml, >5 μg/ml or >10 μg/ml. In exemplary embodiments of the invention, an efficacious vaccine produces >10 mIU/ml, >20 mIU/ml, >50 mIU/ml, >100 mIU/ml, >200 mIU/ml, >500 mIU/ml or >1000 mIU/ml. In exemplary embodiments, the antibody level or concentration is produced or reached by 10 days following vaccination, by 20 days following vaccination, by 30 days following vaccination, by 40 days following vaccination, or by 50 or more days following vaccination. In exemplary embodiments, the level or concentration is produced or reached following a single dose of vaccine administered to the subject. In other embodiments, the level or concentration is produced or reached following multiple doses, e.g., following a first and a second dose (e.g., a booster dose.) In exemplary embodiments, antibody level or concentration is determined or measured by enzyme-linked immunosorbent assay (ELISA). In exemplary embodiments, antibody level or concentration is determined or measured by neutralization assay, e.g., by microneutralization assay.

[0167] The details of various embodiments of the disclosure are set forth in the description below. Other features, objects, and advantages of the disclosure will be apparent from the description and from the claims.

### BRIEF DESCRIPTION OF THE DRAWINGS

[0168] FIG. 1 shows data from an immunogenicity experiment in which mice were immunized with JEV prME mRNA vaccine. The data show that immunization of mice with JEV mRNA vaccine at 10 μg, 2 μg and 0.5 μg doses produces neutralizing antibodies measured between 10² to 10⁴ PRNT50 titers.

[0169] FIG. 2 shows a histogram indicating intracellular detection of ZIKA prME protein using human serum containing anti-ZIKV antigen antibodies.

[0170] FIG. 3 shows the results of detecting prME protein expression in mammalian cells with fluorescence-activated cell sorting (FACS) using a flow cytometer. Cells expressing prME showed higher fluorescence intensity when stained with anti-ZIKV human serum.

[0171] FIG. 4 shows a bar graph of the data provided in FIG. 3.

[0172] FIG. 5 shows a reducing SDS-PAGE gel of Zika VLP.

[0173] FIG. 6 shows a graph of neutralizing titers obtained from BALB/c mice immunized with a ZIKV mRNA vaccine encoding prME.

[0174] FIGS. 7A-7B show percent animal survival (FIG. 7A) and percent weight change (FIG. 7B) in animals following administration of two different doses of a ZIKV RNA vaccine comprising mRNA encoding ZIKV prME.

[0175] FIGS. 8A-8C show Dengue Virus MHC I T cell epitopes. The sequences, from left to right correspond to SEQ ID NO: 365-366 (FIG. 8A), 367-368 (FIG. 8B), and 369-370 (FIG. 8C).

[0176] FIGS. 9A-9C show Dengue Virus MHC II T cell epitopes. The sequences, from left to right, correspond to SEQ ID NO: 371-372 (FIG. 9A), 373-374 (FIG. 9B), and 375 (FIG. 9C).

[0177] FIG. 10 is a graph depicting the results of an ELISPOT assay of dengue-specific peptides.

[0178] FIG. 11 is a graph depicting the results of an ELISPOT assay of dengue-specific peptides.

[0179] FIG. 12 is a schematic of a bone marrow/liver/thymus (BLT) mouse and data on human CD8 T cells stimulated with Dengue peptide epitope.

[0180] FIGS. 13A and 13B shows the results of an Intracellular Cytokine Staining assay performed in PBMC cells.

[0181] FIG. 14A shows FACS analyses of cells expressing DENV2 prMEs using different antibodies against Dengue envelope protein. Numbers in the upper right corner of each plot indicate mean fluorescent intensity. FIG. 14B shows a repeat of staining in triplicate and in two different cell lines (HeLa and 293T).

[0182] FIG. 15 is a graph showing the kinetics of OVA peptide presentation in Jawsii cells. All mRNAs tested are formulated in MC3 lipid nanoparticles.

[0183] FIG. 16 is a graph showing the Mean Fluorescent Intensity (MFI) of antibody binding to DENV-1, 2, 3, and 4 prME epitopes presented on the cell surface.

[0184] FIGS. 17A-17D are graphs showing the design and the results of a challenge study in AG129 mice. FIG. 17A shows the immunization, challenge, and serum collection schedules. FIG. 17B shows the survival of the AG129 mice challenged with Dengue D2Y98P virus after being immunized with the indicated DENV mRNA vaccines. All immunized mice survived 11 days post infection, while the unimmunized (control) mice died. FIGS. 17C and 17D show the weight loss of the AG129 mice post infection. Vaccine 1, 7, 8, or 9 correspond to DENV vaccine construct 22, 21, 23, or 24 of the present disclosure, respectively.

[0185] FIG. 18 is a graph showing the results of an in vitro neutralization assay using serum from mice immunized with the DENV mRNA vaccines in FIGS. 17A-17D.

[0186] FIGS. 19A-19I are graphs showing the results of a challenge study in AG129 mice. The challenge study design is shown in Table 46. FIGS. 19A-19F show the survival, weight loss, and heath score of the AG129 mice challenged with D2Y98P virus after being immunized with the DENV mRNA vaccine groups 1-12 in Table 46. FIGS. 19G-19I show the survival, weight loss, and heath score of the AG129 mice challenged with D2Y98P virus after being immunized with the DENV mRNA vaccine groups 13-19 in Table 46.

[0187] FIG. 20 shows CHIKV envelope protein detection of lysate in Hela cells 16 hours post-transfection.

[0188] FIG. 21A is a graph showing the survival rates of AG129 mice vaccinated with a single 2 μg dose or two 2 μg doses of Chikungunya E1 antigen administered either intramuscularly or intradermally. FIG. 21B is a graph showing the percent weight loss of AG129 mice vaccinated with a single 2 μg dose or two 2 μg doses of Chikungunya E1 antigen administered either intramuscularly or intradermally. FIG. 21C is a graph showing the health scores of AG129 mice vaccinated with a single 2 μg dose or two 2 μg doses of Chikungunya E1 antigen administered either intramuscularly or intradermally.

[0189] FIG. 22A is a graph showing the survival rates of AG129 mice vaccinated with a single 2 μg dose or two 2 μg doses of Chikungunya E2 antigen administered either intramuscularly or intradermally. FIG. 22B is a graph showing the percent weight loss of AG129 mice vaccinated with a single 2 μg dose or two 2 μg doses of Chikungunya E2 antigen administered either intramuscularly or intradermally. FIG. 22C is a graph showing the health scores of AG129 mice vaccinated with a single 2 μg dose or two 2 μg doses of Chikungunya E2 antigen administered either intramuscularly or intradermally.

[0190] FIG. 23A is a graph showing the survival rates of AG129 mice vaccinated with a single 2 μg dose or two 2 μg doses of Chikungunya C-E3-E2-6K-E1 antigen administered either intramuscularly or intradermally. FIG. 23B is a graph showing the percent weight loss of AG129 mice vaccinated with a single 2 μg dose or two 2 μg doses of Chikungunya C-E3-E2-6K-E1 antigen administered either intramuscularly or intradermally. FIG. 23C is a graph showing the health scores of AG129 mice vaccinated with a single 2 μg dose or two 2 μg doses of Chikungunya C-E3-E2-6K-E1 antigen administered either intramuscularly or intradermally.

[0191] FIG. 24A is a graph showing the survival rates of AG129 mice vaccinated with a single 10 μg dose or two 10 μg doses of Chikungunya E1 antigen administered either intramuscularly or intradermally. FIG. 24B is a graph showing the percent weight loss of AG129 mice vaccinated with a single 10 μg dose or two 10 μg doses of Chikungunya E1 antigen administered either intramuscularly or intradermally. FIG. 24C is a graph showing the health scores of AG129 mice vaccinated with a single 10 μg dose or two 10 μg doses of Chikungunya E1 antigen administered either intramuscularly or intradermally.

[0192] FIG. 25A is a graph showing the survival rates of AG129 mice vaccinated with a single 10 μg dose or two 10 μg doses of Chikungunya E2 antigen administered either intramuscularly or intradermally. FIG. 25B is a graph showing the percent weight loss of AG129 mice vaccinated with a single 10 μg dose or two 10 μg doses of Chikungunya E2 antigen administered either intramuscularly or intradermally. FIG. 25C is a graph showing the health scores of AG129 mice vaccinated with a single 10 μg dose or two 10 μg doses of Chikungunya E2 antigen administered either intramuscularly or intradermally.

[0193] FIG. 26A is a graph showing the survival rates of AG129 mice vaccinated with a single 10 μg dose or two 10 μg doses of Chikungunya C-E3-E2-6K-E1 antigen administered either intramuscularly or intradermally. FIG. 26B is a graph showing the percent weight loss of AG129 mice vaccinated with a single 10 μg dose or two 10 μg doses of Chikungunya C-E3-E2-6K-E1 antigen administered either intramuscularly or intradermally. FIG. 26C is a graph showing the health scores of AG129 mice vaccinated with a single 10 μg dose or two 10 μg doses of Chikungunya C-E3-E2-6K-E1 antigen administered either intramuscularly or intradermally.

[0194] FIGS. 27A-27B are graphs showing the survival curves from a CHIKV challenge study in AG129 mice immunized with CHIKV mRNA vaccines in 10 μg, 2 μg, or 0.04 μg doses. Mice were divided into 14 groups (1-4 and 7-16, n=5). FIG. 27A shows the survival curve of mice groups 1˜4 and 7-9 challenged on day 56 post immunization. FIG. 27B shows the survival curve of mice groups 10-16 challenged on day 112 post immunization. Survival curves were plotted as “percent survival” versus “days post infection.” See also Table 63 for survival percentage.

[0195] FIGS. 28A-28B are graphs showing the weight changes post challenge in AG129 mice immunized with CHIKV mRNA vaccines. FIG. 28A shows the weight change of mice groups 1-4 and 7-9 challenged on day 56 post immunization. FIG. 28B shows the weight changes of mice groups 10-16 challenged on day 112 post immunization. Initial weights were assessed on individual mice on study Day 0 and daily thereafter. The mean percent weights for each group compared to their percent weight on Day 0 (baseline) were plotted against “days post-infection”. Error bars represent the standard deviation (SD).

[0196] FIGS. 29A-29B are graphs showing the post challenge heath scores of AG129 mice immunized with CHIKV mRNA vaccines. FIG. 29A shows the health scores of mice groups 1-4 and 7-9 challenged on day 56 post immunization. FIG. 29B shows the health score of mice groups 10-16 challenged on day 112 post immunization. The mean health scores for each group were plotted against “days post infection” and error bars represent the SD. Mean health scores were calculated based on observations described in Table 51.

[0197] FIGS. 30A-30C are graphs showing the antibody titers measured by ELISA assays in the serum of AG129 mice (groups 1-4 and 7-9) 28 days post immunization with CHIKV mRNA vaccines. FIG. 30A shows the serum antibody titers against CHIKV E1 protein. FIG. 30B shows the serum antibody titers against CHIKV E2 protein. FIG. 30C shows the serum antibody titers against CHIKV lysate.

[0198] FIGS. 31A-31C are graphs showing the antibody titers measured by ELISA assays in the serum of AG129 mice (groups 10-16) 28 days post immunization with CHIKV mRNA vaccine. FIG. 31A shows the serum antibody titers against CHIKV E1 protein. FIG. 31B shows the serum antibody titers against CHIKV E2 protein. FIG. 31C shows the serum antibody titers against CHIKV lysate.

[0199] FIGS. 32A-32C are graphs showing the antibody titers measured by ELISA assays in the serum of AG129 mice (groups 10-16) 56 days post immunization with CHIKV mRNA vaccine. FIG. 32A shows the serum antibody titers against CHIKV E1 protein. FIG. 32B shows the serum antibody titers against CHIKV E2 protein. FIG. 32C shows the serum antibody titers against CHIKV lysate.

[0200] FIGS. 33A-33C are graphs showing the antibody titers measured by ELISA assays in the serum of AG129 mice (groups 10-16) 112 days post immunization with CHIKV mRNA vaccine. FIG. 33A shows the serum antibody titers against CHIKV E1 protein. FIG. 33B shows the serum antibody titers against CHIKV E2 protein. FIG. 33C shows the serum antibody titers against CHIKV lysate.

[0201] FIG. 34 shows a set of graphs depicting results of an ELISA assay to identify the amount of antibodies produced in AG129 mice in response to vaccination with mRNA encoding secreted CHIKV E1 structural protein, secreted CHIKV E2 structural protein, or CHIKV full structural polyprotein C-E3-E2-6k-E1 at a dose of 10 μg or 2 μg at 28 days post immunization.

[0202] FIG. 35 shows a set of graphs depicting results of an ELISA assay to identify the amount of antibodies produced in AG129 mice in response to vaccination with mRNA encoding secreted CHIKV E1 structural protein, secreted CHIKV E2 structural protein, or CHIKV full structural polyprotein C-E3-E2-6k-E1 at a dose of 10 μg or 2 μg at 28 days post immunization. The two panels depict different studies.

[0203] FIG. 36 is a graph depicting comparison of ELISA titers from the data of FIG. 34 to survival in the data of FIG. 35 left panel.

[0204] FIG. 37 shows a set of graphs depicting efficacy results in mice in response to vaccination with mRNA encoding CHIKV full structural polyprotein C-E3-E2-6k-E1 at a dose of 10 μg (left panels), 2 μg (middle panels) or 0.4 μg (right panels) at 56 days (top panels) or 112 days (bottom panels) post-immunization.

[0205] FIG. 38 shows a set of graphs depicting amount of neutralizing antibody produced in mice in response to vaccination with mRNA encoding CHIKV full structural polyprotein C-E3-E2-6k-E1 at a dose of 10 μg, 2 μg, or 0.4 μg at 56 days post immunization.

[0206] FIG. 39 shows a set of graphs depicting binding antibody produced in mice in response to vaccination with mRNA encoding CHIKV full structural polyprotein C-E3-E2-6k-E1 at a dose of 10 μg, 2 μg, or 0.4 μg at 56 days post immunization (top panels) and the corresponding correlation between binding and neutralizing antibodies (bottom panels).

[0207] FIG. 40 shows a set of graphs depicting amount of neutralizing antibody produced in A129 mice in response to vaccination with mRNA encoding CHIKV full structural polyprotein C-E3-E2-6k-E1 at a dose of 10 μg, 2 μg, or 0.4 μg at 56 days post immunization against three different strains of CHIKV, African-Senegal (left panel), La Reunion (middle panel) and CDC CAR (right panel).

[0208] FIG. 41 shows a graph depicting neutralizing antibodies against CHIKV S27 strain.

[0209] FIG. 42 is a graph depicting antibody titer against CHIKV lysate post 3rd vaccination 10 with the mRNA vaccine in Sprague Dawley rats.

[0210] FIG. 43 shows a set of graphs depicting antibody titers following vaccination of mice with mRNA encoded CHIKV polyprotein (C-E3-E2-6K-E1).

[0211] FIG. 44 shows a set of plots depicting cytokine secretion and T-cell activation following vaccination of mice with mRNA encoded CHIKV polyprotein (C-E3-E2-6K-E1).

[0212] FIGS. 45A-45B show a set of graphs depicting CD8+ T cell activation following vaccination of mice with mRNA encoded CHIKV polyprotein (C-E3-E2-6K-E1).

[0213] FIG. 46 shows a set of graphs depicting binding antibody titers against CHIKV lysate (upper graph) and neutralizing titers against 37997 CHIKV. The vaccine induces a robust antibody response in non-human primates (NHPs).

[0214] FIG. 47 shows a set of graphs depicting a robust CD4 response to a CHIKV vaccine in NHPs.

### DETAILED DESCRIPTION

[0215] Vaccines containing antigens from more than one pathogenic organism within a single dose are referred to as “multivalent” or “combination” vaccines. While various combination vaccines have been approved for human use in several countries, including trivalent vaccines for protecting against diphtheria, tetanus and pertussis (“DTP” vaccines) and trivalent vaccines for protecting against measles, mumps and rubella (“MMR” vaccines), combination vaccines are more complex and are associated with more problems than monovalent vaccines. For instance, current combination vaccines can include relatively high amounts of aluminum salts as adjuvants which causes concern to some patients despite empirical safety studies. Additionally, the well-documented phenomenon of antigenic competition (or interference) complicates the development of multi-component vaccines. Antigenic interference refers to the observation that administering multiple antigens often results in a diminished response to certain antigens relative to the immune response observed when such antigens are administered individually. The combination RNA vaccines of the invention can be designed to encode two, three, four, five or more, antigens against multiple pathogenic organisms, while avoiding a number of the problems associated with traditional combination vaccines.

[0216] Travelers facing a particular geographic viral threat would also benefit from vaccination with a combination vaccine of the invention. The traveler's vaccine may be tailored based on the prevalence of particular viral diseases in the destination location. For instance a combination vaccine including WNV, SINV, VEEV, and EEEV would be particularly beneficial.

[0217] Embodiments of the present disclosure provide RNA (e.g., mRNA) vaccines that are useful for vaccinating against multiple pathogens. The combination vaccines of the present disclosure encode antigens from multiple pathogens (e.g., bacteria, arboviruses, alphaviruses and flaviviruses), including but not limited to Plasmodium (e.g., P. falciparum, P. vivax, P. malariae and/or P. ovale), Japanese Encephalitis Virus (JEV), West Nile Virus (WNV), Eastern Equine Encephalitis (EEEV), Venezuelan Equine Encephalitis Virus (VEEV), Sindbis Virus (SINV), Chikungunya Virus (CHIKV), Dengue Virus (DENV), Zika Virus (ZIKV) and/or Yellow Fever Virus (YFV) antigenic polypeptide.

[0218] Thus, the present disclosure provides, in some embodiments, vaccines that comprise RNA (e.g., mRNA) polynucleotides encoding a Malaria (e.g., P. falciparum, P. vivax, P. malariae and/or P. ovale), JEV, WNV, EEEV, VEEV, SINV, CHIKV, DENV, ZIKV and/or YFV antigenic polypeptide. The present disclosure also provides, in some embodiments, combination vaccines that comprise at least one RNA (e.g., mRNA) polynucleotide encoding at least two antigenic polypeptides selected from Malaria (e.g., P. falciparum, P. vivax, P. malariae and/or P. ovale), JEV, WNV, EEEV, VEEV, SINV, CHIKV, DENV, ZIKV and YFV antigenic polypeptides. Also provided herein are methods of administering the RNA (e.g., mRNA) vaccines, methods of producing the RNA (e.g., mRNA) vaccines, compositions (e.g., pharmaceutical compositions) comprising the RNA (e.g., mRNA) vaccines, and nucleic acids (e.g., DNA) encoding the RNA (e.g., mRNA) vaccines. In some embodiments, a RNA (e.g., mRNA) vaccine comprises an adjuvant, such as a flagellin adjuvant, as provided herein.

[0219] The RNA (e.g., mRNA) vaccines (e.g., Malaria (e.g., P. falciparum, P. vivax, P. malariae and/or P. ovale), JEV, WNV, EEEV, VEEV, SINV, CHIKV, DENV, ZIKV and/or YFV RNA vaccines), in some embodiments, may be used to induce a balanced immune response, comprising both cellular and humoral immunity, without many of the risks associated with DNA vaccination.

[0220] The entire contents of International Application No. PCT/US2015/02740 is incorporated herein by reference.

### Malaria

[0221] Malaria is an infectious disease caused by protozoan parasites from the Plasmodium family. Anopheles mosquitoes transmit Malaria, and they must have been infected through a previous blood meal taken from an infected person. When a mosquito bites an infected person, a small amount of blood is taken in and contains microscopic Malaria parasites. There are four main types of Malaria which infect humans: Plasmodium falciparum, P. vivax, P. malariae and P. ovale. Falciparum Malaria is the most deadly type. Many Malaria parasites are now immune to the most common drugs used to treat the disease.

[0222] Embodiments of the present disclosure provide RNA (e.g., mRNA) vaccines that include polynucleotide encoding a Plasmodium antigen. Malaria parasites are microorganisms that belong to the genus Plasmodium. There are more than 100 species of Plasmodium, which can infect many animal species such as reptiles, birds, and various mammals. Four species of Plasmodium have long been recognized to infect humans in nature, including P. falciparum, P. vivax, P. malariae and P. ovale. In addition, there is one species that naturally infects macaques which has recently been recognized to be a cause of zoonotic Malaria in humans.

[0223] Malaria RNA (e.g., mRNA) vaccines, as provided herein may be used to induce a balanced immune response, comprising both cellular and humoral immunity, without many of the risks associated with DNA vaccination.

[0224] P. falciparum infects humans and is found worldwide in tropical and subtropical areas. It is estimated that every year approximately 1 million people are killed by P. falciparum, especially in Africa where this species predominates. P. falciparum can cause severe Malaria because it multiples rapidly in the blood, and can thus cause severe blood loss (anemia). In addition, the infected parasites can clog small blood vessels. When this occurs in the brain, cerebral Malaria results, a complication that can be fatal. Some embodiments of the present disclosure provide Malaria vaccines that include at least one RNA (e.g., mRNA) polynucleotide having an open reading frame encoding at least one P. falciparum antigenic polypeptide or an immunogenic fragment thereof (e.g., an immunogenic fragment capable of raising an immune response to P. falciparum).

[0225] P. vivax infects humans and is found mostly in Asia, Latin America, and in some parts of Africa. Because of the population densities, especially in Asia, it is probably the most prevalent human Malaria parasite. P. vivax (as well as P. ovale) has dormant liver stages (“hypnozoites”) that can activate and invade the blood (“relapse”) several months or years after the infecting mosquito bite. Some embodiments of the present disclosure provide Malaria vaccines that include at least RNA (e.g., mRNA) polynucleotide having an open reading frame encoding at least one P. vivax antigenic polypeptide or an immunogenic fragment thereof (e.g., an immunogenic fragment capable of raising an immune response to P. vivax).

[0226] P. ovale infects humans and is found mostly in Africa (especially West Africa) and the islands of the western Pacific. It is biologically and morphologically very similar to P. vivax. However, differently from P. vivax, it can infect individuals who are negative for the Duffy blood group, which is the case for many residents of sub-Saharan Africa. This explains the greater prevalence of P. ovale (rather than P. vivax) in most of Africa. Some embodiments of the present disclosure provide Malaria vaccines that include at least one RNA (e.g., mRNA) polynucleotide having an open reading frame encoding at least one P. ovale antigenic polypeptide or an immunogenic fragment thereof (e.g., an immunogenic fragment capable of raising an immune response to P. ovale).

[0227] P. malariae infects humans and is found worldwide. It is the only human Malaria parasite species that has a quartan cycle (three-day cycle). The three other species that infect human have a tertian, two-day cycle. If untreated, P. malariae causes a long-lasting, chronic infection that in some cases can last a lifetime. In some chronically infected patients P. malariae can cause serious complications such as the nephrotic syndrome. Some embodiments of the present disclosure provide Malaria vaccines that include at least one RNA (e.g., mRNA) polynucleotide having an open reading frame encoding at least one P. malariae antigenic polypeptide or an immunogenic fragment thereof (e.g., an immunogenic fragment capable of raising an immune response to P. malariae).

[0228] P. knowlesi is found throughout Southeast Asia as a natural pathogen of long-tailed and pig-tailed macaques. It has recently been shown to be a significant cause of zoonotic Malaria in that region, particularly in Malaysia. P. knowlesi has a 24-hour replication cycle and so can rapidly progress from an uncomplicated to a severe infection; fatal cases have been reported.

[0229] In some embodiments, an antigenic polypeptide is any antigen that is expressed on the sporozoite or other pre-erythrocytic stage of a Plasmodium parasite, such as the liver stage. For example, an antigenic polypeptide may be a circumsporozoite (CS) protein, liver stage antigen-1 (LSA1) (see, e.g., WO2004/044167 and Cummings J F et al. Vaccine 2010; 28:5135-44, incorporated herein by reference), liver stage antigen-3 (LSA-3) (see, e.g., EP 0 570 489 and EP 0 833 917, incorporated herein by reference), Pfs 16 kD (see, e.g., WO 91/18922 and EP 597 843), Exported antigen-1 (Exp-1) (described for example in Meraldi et al. Parasite Immunol 2002; 24 (3): 141, incorporated herein by reference), sporozoite-threonine-asparagine-rich protein (STARP), sporozoite and liver stage antigen (SALSA), thrombospondin related anonymous protein (TRAP) (see, e.g., WO 90/01496, WO 91/11516 and WO 92/11868, incorporated herein by reference) and apical merozoite antigen-1 (AMA1) (see, e.g., EP 0 372 019 and Remargue E J et al. Trends in Parasitology 2007; 24 (2): 74-84, incorporated herein by reference) which has recently been shown to be present at the liver stage (in addition to the erythrocytic stage), and merozoite surface protein-1 (MSP1) (see, e.g., Reed Z H et al. Vaccine 2009:27:1651-60, incorporated herein by reference). An antigenic polypeptide may be the entire protein, an immunogenic fragment thereof, or a derivative thereof of any of the foregoing antigens. Immunogenic fragments of Malaria antigens are known, including, for example, the ectodomain from AMA1 (see, e.g., WO 02/077195, incorporated herein by reference). Derivatives include, for example, fusions with other proteins that may be Malaria proteins or non-Malaria proteins, such as HBsAg. Derivatives of the present disclosure are capable of raising an immune response against the native antigen.

[0230] The sporozoite stage of Plasmodium (e.g., P. falciparum or P. vivax) is a potential target of a Malaria vaccine. The major surface protein of the sporozoite is circumsporozoite protein (CS protein). The Plasmodium circumsporozoite protein (CS) is expressed during the sporozoite and early liver stages of parasitic infection. This protein is involved in the adhesion of the sporozoite to the hepatocyte and invasion of the hepatocyte. Anti-CS antibodies inhibit parasite invasion and are also associated with a reduced risk of clinical Malaria in some studies. Antibodies raised through immunization with only the conserved Asparagine-Alanine-Asparagine-Proline (NANP) amino acid repeat sequence, the immunodominant B-cell epitope from P. falciparum CS, are capable of blocking sporozoite invasion of hepatocytes.

[0231] CS protein has been cloned, expressed and sequenced for a variety of strains, for example for P. falciparum the NF54 strain, clone 3D7 (Caspers et al. Parasitol 1989; 35:185-190, incorporated herein by reference). The protein from strain 3D7 has a central immunodominant repeat region comprising a tetrapeptide Asn-Ala-Asn-Pro (SEQ ID NO: 434) repeated 40 times and interspersed with four minor repeats of the tetrapeptide Asn-Val-Asp-Pro (SEQ ID NO: 435). In other strains, the number of major and minor repeats as well as their relative position varies. This central portion is flanked by an N and C terminal portion composed of non-repetitive amino acid sequences designated as the repeatless portion of the CS protein.

[0232] Some embodiments of the present disclosure provide Malaria vaccines that include at least one RNA (e.g., mRNA) polynucleotide having an open reading frame encoding Plasmodium CS protein or an immunogenic fragment thereof (e.g., an immunogenic fragment capable of raising an immune response to Plasmodium).

[0233] Liver Stage Antigen-1 (LSA1), expressed during Plasmodium falciparum hepatic schizogony is highly conserved, is abundantly expressed from early through late schizogony, presumably allowing time for both circulating and memory-recalled effector cells to infiltrate the liver and exert their effector function, and it is possible that high titer antibody could act upon the cloud of flocculent liver stage antigen enveloping hepatic merozoites to impede the latter's emergence and subsequent invasion of erythrocytes. LSA1 is a 230 kDa protein, with a large central repeat region (over 80 repeats of 17 amino acids each) flanked by two highly conserved N- and C-terminal regions, known to contain B cell and CD4+ and CD8+ T cell epitopes.

[0234] Some embodiments of the present disclosure provide Malaria vaccines that include at least one RNA (e.g., mRNA) polynucleotide having an open reading frame encoding Plasmodium LSA1 or an immunogenic fragment thereof (e.g., an immunogenic fragment capable of raising an immune response to Plasmodium). In some embodiments, Malaria vaccines include at least one RNA (e.g., mRNA) polynucleotide having an open reading frame encoding a recombinant protein with full-length C- and N-terminal flanking domains and two of the 17 amino acid repeats from the central repeat region, referred to as “LSA-NRC.”

[0235] Present on the surface of all known Plasmodium spp., merozoite surface protein 1 (MSP1) is a polypeptide of 190-230 kDa that undergoes processing during schizont rupture to produce at least four distinct fragments (83, 28-30, 38-45 and 42 kDa). Further cleavage of the carboxy-terminal 42-kDa (MSP142) fragment yields a 19-kDa fragment (MSP119), in a process that appears to be critical for merozoite invasion. Both MSP142 and MSP119 regions of P. falciparum are encompassed by the present disclosure.

[0236] Thus, in some embodiments, Malaria vaccines include at least one RNA (e.g., mRNA) polynucleotide having an open reading frame encoding Plasmodium MSP1 or an immunogenic fragment thereof (e.g., an immunogenic fragment capable of raising an immune response to Plasmodium).

[0237] In some embodiments, Malaria vaccines include at least one RNA (e.g., mRNA) polynucleotide having an open reading frame encoding Plasmodium MSP1, MSP3 and AMA1.

[0238] Apical membrane antigen 1 (AMA1) is a micronemal protein of apicomplexan parasites that appears to be essential during the invasion of host cells. Immune responses to Plasmodium AMA1 can have parasite-inhibitory effects, both as measured in vitro and in animal challenge models. First identified as an invariant Plasmodium knowlesi merozoite surface antigen, AMA1 is believed to be unique to apicomplexan and derives from a single essential gene present in all Plasmodium species.

[0239] Some embodiments of the present disclosure provide Malaria vaccines that include at least one RNA (e.g., mRNA) polynucleotide having an open reading frame encoding Plasmodium AMA1 or an immunogenic fragment thereof (e.g., an immunogenic fragment capable of raising an immune response to Plasmodium).

### Japanese Encephalitis Virus (JEV)

[0240] Japanese encephalitis virus (JEV), a mosquito-borne flavivirus, is a common cause of encephalitis in Asia. Japanese encephalitis (JE) occurs throughout most of Asia and parts of the western Pacific. Among an estimated 35,000-50,000 annual cases, approximately 20%-30% of patients die, and 30%-50% of survivors have neurologic or psychiatric sequelae. In endemic countries, JE is primarily a disease of children. However, travel-associated JE, although rare, can occur in a wide portion of the population. JEV is transmitted in an enzootic cycle between mosquitoes and amplifying vertebrate hosts, primarily pigs and wading birds. JEV is transmitted to humans through the bite of an infected mosquito, primarily in rural agricultural areas. In most temperate areas of Asia, JEV transmission is seasonal, and substantial epidemics can occur.

[0241] Vaccines available for use against JEV infection include live virus inactivated by such methods as formalin treatment, as well as attenuated virus (Tsai et al., in Vaccines (Plotkin, cd.) W. B. Saunders, Philadelphia, Pa., 1994, pp. 671-713). Whole virus vaccines, although effective, do have certain problems and/or disadvantages. The viruses are cultivated in mouse brain or in cell culture using mammalian cells as the host. Such culture methods are cumbersome and expensive.

[0242] Embodiments of the present disclosure provide RNA (e.g., mRNA) vaccines that include polynucleotide encoding a JEV antigen. JEV is a small-enveloped virus with a single-stranded, plus-sense RNA genome, consisting of a single open reading frame that codes for a large polyprotein which is co- and post-translationally cleaved into three structural (capsid, C; pre-membrane, prM; and envelope, E) and seven non-structural proteins (NS1, NS2A, NS2B, NS3, NS4A, NS4B and NS5). The RNA genome of JEV has a type I cap structure at its 5′-terminus but lacks a poly(A) tail at its 3′ terminus. E protein is involved in a number of important functions related to virus infection such as receptor binding and membrane fusion. E protein has been used to raise antibodies that neutralize virus activity in vitro as well as in vivo. Additionally, sub-viral particles consisting of only the prM and the E proteins were highly effective in generating protective immune response in mice against JEV. The ability of various JEV structural and non-structural proteins to produce an immune response has been examined. (Chen, H. W., et al., 1999. J. Virol. 73:10137-10145.) In view of these and other studies it has been concluded that the E protein is an important protein for inducing protective immunity against JEV.

[0243] The full-length E protein is membrane anchored. Immunogenic fragments of the E protein can be generated by removing the anchor signal. For instance, truncated Ea protein wherein a 102-amino acid hydrophobic sequence has been removed from the C-terminus of the protein to generate a 398-amino acid Es protein for immunogenic antigenic fragments. Other immunogenic fragments include a secretory form of E protein, as opposed to the anchored protein. Thus immunogenic fragments include the truncated E protein and the secretory envelope protein (Es) of JEV. JEV antigens may also include one or more non-structural proteins selected from NS1, NS2A, NS2B, NS3, NS4A, NS4B and NS5.

[0244] Since the envelope (most external portion of a JEV particle) is the first to encounter target cells, the present disclosure encompasses antigenic polypeptides associated with the envelope as immunogenic agents. In brief, surface and membrane proteins E, Es, capsid and prM—as single antigens or in combination with or without adjuvants may be used as JEV vaccine antigens.

[0245] In some embodiments, JEV vaccines comprise RNA (e.g., mRNA) encoding JEV E antigenic polypeptides or immunogenic fragments thereof.

[0246] In some embodiments, JEV vaccines comprise RNA (e.g., mRNA) encoding JEV Es antigenic polypeptides or immunogenic fragments thereof.

[0247] In some embodiments, JEV vaccines comprise RNA (e.g., mRNA) encoding JEV capsid antigenic polypeptides or immunogenic fragments thereof.

[0248] In some embodiments, JEV vaccines comprise RNA (e.g., mRNA) encoding JEV prM antigenic polypeptides or immunogenic fragments thereof.

[0249] In some embodiments, JEV vaccines comprise RNA (e.g., mRNA) encoding JEV NS1 antigenic polypeptides or immunogenic fragments thereof.

[0250] In some embodiments, JEV vaccines comprise RNA (e.g., mRNA) encoding JEV antigenic polypeptides having at least 80%, 85%, 90%, 92%, 95%, 96%, 97%, 98% or 99% identity with JEV E protein and has receptor binding and/or membrane fusion activity.

[0251] In some embodiments, JEV vaccines comprise RNA (e.g., mRNA) encoding JEV antigenic polypeptides having at least 80%, 85%, 90%, 92%, 95%, 96%, 97%, 98% or 99% identity with JEV Es protein and has receptor binding and/or membrane fusion activity.

[0252] In some embodiments, JEV vaccines comprise RNA (e.g., mRNA) encoding JEV antigenic polypeptides having at least 80%, 85%, 90%, 92%, 95%, 96%, 97%, 98% or 99% identity with JEV capsid protein having capsid activity.

[0253] In some embodiments, JEV vaccines comprise RNA (e.g., mRNA) encoding JEV antigenic polypeptides having at least 80%, 85%, 90%, 92%, 95%, 96%, 97%, 98% or 99% identity with JEV prM protein and has activity of an immature virion.

[0254] In some embodiments, JEV vaccines comprise RNA (e.g., mRNA) encoding JEV antigenic polypeptides having at least 80%, 85%, 90%, 92%, 95%, 96%, 97%, 98% or 99% identity with JEV NS1 protein and has viral replication and pathogenicity activity.

[0255] JEV RNA vaccines, as provided herein may be used to induce a balanced immune response, comprising both cellular and humoral immunity, without many of the risks associated with DNA vaccination.

### West Nile Virus (WNV), Eastern Equine Encephalitis (EEEV), Venezuelan Equine Encephalitis Virus (VEEV), and Sindbis Virus (SINV)

[0256] WNV was first isolated in the West Nile region of Uganda, Africa, and belongs to the Flaviviridae family falvivirus genus. The structure of virus particles consists of a spherical structure wherein a capsid protein (C protein) is bonded to one (+) chain RNA virus gene, and a lipid bilayer membrane surrounding the spherical structure. The lipid membrane includes two kinds of proteins: envelope protein (E protein) and membrane protein (M protein). M protein is produced as a precursor prM protein and cleaved with a protease called furin to become a mature protein. West Nile virus (WNV) is an important mosquito transmitted virus which is now native to the U.S.

[0257] West Nile fever is a systemic acute fever disease caused by infection with WNV. Occasionally, the virus invades and grows in the central nervous system to cause lethal brain meningitis. WNV is widely distributed in Africa, Middle East, part of Europe, Russia, India, and Indonesia. The virus is maintained and propagated by an infection ring. The West Nile fever virus is transmitted to birds and mammals by the bites of certain mosquitoes (e.g., Culex, Aedes, Anopheles). Direct transmission may happen from WNV infected subject to healthy subject by oral transmission (prey and transmission through colostrum) and blood/organ vectored transmission. Humans, horses and domestic animals are hosts. Recently, WNV invaded and was indigenized in the US and has expanded since then. A prevalent US strain is West Nile virus NY99-flamingo 382-99 strain (Lanciotti, R. S. et al., Science, 286:2333-2337, 1999) (GenBank Accession No. AF196835).

[0258] The WNV antigens in the combination RNA vaccine may be derived from a particular WNV strain, such as NY99 or KEN-3829 or any other strain. Additional WNV strains are known in the art. West Nile virus antigens include the following proteins and polyproteins: C (capsid), E (envelope), M (membrane), prM (Pre-membrane), NS2A, NS2B, NS3 prM-E, M-E, prM-M, prM-M-E, and NS2A-NS2B—NS3.

[0259] Eastern equine encephalitis virus (EEEV), Western equine encephalitis virus (WEEV), and Venezuelan equine encephalitis virus (VEEV) are members of the Alphavirus genus of the family Togaviridae. The genus is comprised of at least 27 different arthropod-borne RNA viruses that are found throughout much of the world. The viruses normally circulate among avian or rodent hosts through the feeding activities of a variety of mosquitoes.

[0260] EEEV causes encephalitis in humans and equines in epidemic proportions. However, EEEV causes the most severe of the arboviral encephalitides in humans, with high mortality and severe neurological sequelae in survivors (Fields Virology, 4.sup.th Ed., Chapter 30 Alphaviruses, 917-962). The virus is known to be focally endemic along much of the Atlantic and Gulf Coasts of North America. It has also been found in southern Canada, the Caribbean, Central America, the eastern part of Mexico and in large sections of South America. Inland foci exist in the Great Lakes region and South Dakota in the U.S. as well as the Amazon Basin.

[0261] The current EEEV vaccine for veterinary applications in the U.S. is a formalin-inactivated whole virus preparation derived from the PE-6 strain (Bartelloni, et al. Am J. Trop Med Hyg. 19:123-126; Marie, et al. Am J Trop Med Hyg. 19:119-122). Currently there is no human vaccine. The inactivated veterinary vaccine is poorly immunogenic, requires multiple inoculations with frequent boosters and generally results in immunity of short duration.

[0262] EEEV, SINV, JEV, and CHIKV all have single-stranded, positive sense RNA genomes. A portion of the genome encodes the viral structural proteins Capsid, E3, E2, 6K, and E1, each of which are derived by proteolytic cleavage of the product of a single open reading frame. The nucleocapsid (C) protein possesses autoproteotytic activity which cleaves the C protein from the precursor protein soon after the ribosome transits the junction between the C and E3 protein coding sequence. Subsequently, the envelope glycoproteins E2 and E1 are derived by proteolytic cleavage in association with intracellular membranes and form heterodimers. E2 initially appears in the infected cell as the precursor protein PE2, which consists of E3 and E2. After extensive glycosylation and transit through the endoplasmic reticulum and the Golgi apparatus, E3 is cleaved from E2 by the furin protease. Subsequently, the E2/E1 complex is transported to the cell surface where it is incorporated into virus budding from the plasma membrane. The envelope proteins play an important role in attachment and fusion to cells.

[0263] Sindbis Virus (SINV) is also a member of the Togaviridae family, in the alphavirus subfamily and is transmitted by mosquitoes. Sindbis fever is most common in South and East Africa, Egypt, Israel, Philippines and parts of Australia. The genome encodes four non-structural proteins at the 5′ end and the capsid and two envelope proteins at the 3′ end. The non-structural proteins are involved in genome replication and the production of new genomic RNA and a shorter sub-genomic RNA strand. The viruses assemble at the host cell surfaces and acquire their envelope through budding.

### Yellow Fever Virus (YFV)

[0264] Along with other viruses in the Flaviviridae family, Yellow fever virus is enveloped and icosahedral with a non-segmented, single-stranded, positive sense RNA genome. It is most closely related to the Sepik virus and is one of the two viruses in clade VIII. In 1927, Yellow fever virus was the first human virus to be isolated. It is found in tropical areas of Africa and South America. YFV is believed to have originated in Africa and spread to South America through slave trades in the 17^{th} century. Since then, there have been Yellow fever outbreaks in the Americas, Africa and Europe. It is transmitted by mosquitoes and has been isolated from a number of species in the genus Aedes (e.g., Aedes aegypti, Aedes africanus or Aedes albopictus). Mosquitos of the genus Haemagogus and Sabethes can also serve as vectors. Studies show that the extrinsic incubation period in mosquitoes is about 10 days. Vertebrate hosts of the virus include monkeys and humans.

[0265] Forty-seven African and South American countries are either endemic for, or have regions that are endemic from, Yellow fever. It is estimated that in 2013 alone, there were 84,000 to 170,000 severe cases of yellow fever and 29,000 to 60,000 deaths associated with Yellow fever.

[0266] What is important is not only the number of cases but also the clinical manifestation of the cases. After YFV incubates in the body for about 6 days, symptoms including fever, muscle pain, backache, headache, loss of appetite, and nausea or vomiting are observed. In most cases, these symptoms disappear after about 4 days. In a small percentage of patients, a more toxic phase of the disease is observed within 24 hours of recovering from the initial symptoms. In this toxic phase, patients develop high fever, jaundice, dark urine and abdominal pain with vomiting. Half of the patients that enter the toxic phase die within 10 days.

[0267] In some embodiments, YFV vaccines comprise RNA (e.g., mRNA) encoding a YFV antigenic polypeptide having at least 95%, at least 96%, at least 97%, at least 98% or at least 99% identity with YFV polyprotein and having YFV polyprotein activity, respectively. The YFV polyprotein is cleaved into capsid, precursor membrane, envelope, and non-structural proteins (NS1, NS2A, NS2B, NS3, NS4A, NS4B, NS5).

[0268] A protein is considered to have YFV polyprotein activity if, for example, it facilitates the attachment of the viral envelope to host receptors, mediates internalization into the host cell, and aids in fusion of the virus membrane with the host's endosomal membrane.

### Zika Virus (ZIKV)

[0269] Along with other viruses in the Flaviviridae family, Zika virus is enveloped and icosahedral with a non-segmented, single-stranded, positive sense RNA genome. It is most closely related to the Spondweni virus and is one of the two viruses in the Spondweni virus clade. The virus was first isolated in 1947 from a rhesus monkey in the Zika Forest of Uganda, Africa and was isolated for the first time from humans in 1968 in Nigeria. From 1951 through 1981, evidence of human infection was reported from other African countries such as Uganda, Tanzania, Egypt, Central African Republic, Sierra Leone and Gabon, as well as in parts of Asia including India, Malaysia, the Philippines, Thailand, Vietnam and Indonesia. It is transmitted by mosquitoes and has been isolated from a number of species in the genus Aedes-Aedes aegypti, Aedes africanus, Aedes apicoargenteus, Aedes furcifer, Aedes luteocephalus and Aedes vitattus. Studies show that the extrinsic incubation period in mosquitoes is about 10 days. The vertebrate hosts of the virus include monkeys and humans.

[0270] As of early 2016, the most widespread outbreak of Zika fever, caused by the Zika virus, is ongoing primarily in the Americas. The outbreak began in April 2015 in Brazil, and subsequently spread to other countries in South America, Central America, and the Caribbean.

[0271] The Zika virus was first linked with newborn microcephaly during the Brazil Zika virus outbreak. In 2015, there were 2,782 cases of microcephaly compared with 147 in 2014 and 167 in 2013. The Brazilian Health Ministry has reported 4783 cases of suspected microcephaly as of Jan. 30, 2016, an increase of more than 1000 cases from a week earlier. Confirmation of many of the recent cases is pending, and it is difficult to estimate how many cases went unreported before the recent awareness of the risk of virus infections.

[0272] What is important is not only the number of cases but also the clinical manifestation of the cases. Brazil is seeing severe cases of microcephaly, which are more likely to be paired with greater developmental delays. Most of what is being reported out of Brazil is microcephaly with other associated abnormalities. The potential consequence of this is the fact that there are likely to be subclinical cases where the neurological sequelae will only become evident as the children grow.

[0273] Zika virus has also been associated with an increase in a rare condition known as Guillain-Barré, where the infected individual becomes essentially paralyzed. During the Zika virus outbreak in French Polynesia, of the 74 patients which had had Zika symptoms, 42 were diagnosed with Guillain-Barre syndrome. In Brazil, 121 cases of neurological manifestations and Guillain-Barre syndrome (GBS) were reported, all cases with a history of Zika-like symptoms.

[0274] The design of preferred Zika vaccine mRNA constructs of the invention encode prME proteins from the Zika virus intended to produce significant immunogenicity. The open reading frame comprises a signal peptide (to optimize expression into the endoplasmic reticulum) followed by the Zika prME polyprotein sequence. The particular prME sequence used is from a Micronesian strain (2007) that most closely represents a consensus of contemporary strain prMEs. This construct has 99% prME sequence identity to the current Brazilian isolates.

[0275] Within the Zika family, there is a high level of homology within the prME sequence (>90%) across all strains so far isolated. The high degree of homology is also preserved when comparing the original isolates from 1947 to the more contemporary strains circulating in Brazil in 2015, suggesting that there is “drift” occurring from the original isolates. Furthermore, attenuated virus preparations have provided cross-immunization to all other strains tested, including Latin American/Asian, and African. Overall, this data suggests that cross-protection of all Zika strains is possible with a vaccine based on prME. In fact, the prM/M and E proteins of ZIKV have a very high level (99%) of sequence conservation between the currently circulating Asiatic and Brazilian viral strains.

[0276] The M and E proteins are on the surface of the viral particle. Neutralizing antibodies predominantly bind to the E protein, the preM/M protein functions as a chaperone for proper folding of E protein and prevent premature fusion of E protein within acidic compartments along the cellular secretory pathway.

[0277] Described herein are examples of ZIKV vaccine designs comprising mRNA encoding the both prM/M and E proteins or E protein alone. In some embodiments, the mRNA encodes an artificial signal peptide fused to prM protein fused to E protein. In some embodiments, the mRNA encodes an artificial signal peptide fused to E protein.

[0278] ZIKV vaccine constructs can encode the prME or E proteins from different strains, for example, Brazil_isolate_ZikaSPH2015 or ACD75819_Micronesia, having a signal peptide fused to the N-termini of the antigenic protein(s). In some embodiments, ZIKV vaccines comprise mRNAs encoding antigenic polypeptides having amino acid sequences of SEQ ID NO: 156-222 or 469.

### Dengue Virus (DENV)

[0279] There is no specific treatment for DENV infection, and control of DENV by vaccination has proved elusive, in part, because the pathogenesis of DHF/DSS is not completely understood. While infection with one serotype confers lifelong homotypic immunity, it confers only short term (approximately three to six months) cross protection against heterotypic serotypes. Also, there is evidence that prior infection with one type can produce an antibody response that can intensify, or enhance, the course of disease during a subsequent infection with a different serotype. The possibility that vaccine components could elicit enhancing antibody responses, as opposed to protective responses, has been a major concern in designing and testing vaccines to protect against dengue infections.

[0280] In late 2015 and early 2016, the first dengue vaccine, Dengvaxia (CYD-TDV) by Sanofi Pasteur, was registered in several countries for use in individuals 9-45 years of age living in endemic areas. Issues with the vaccine include (1) weak protection against DENV1 and DENV2 (<60% efficacy); (2) relative risk of dengue hospitalization among children <9 years old (7.5× higher than placebo); (3) immunogenicity not sustained after 1-2 years (implying the need for a 4^{th} dose booster); and (4) lowest efficacy against DENV2, which often causes more severe conditions. This latter point is a major weakness with the Dengvaxia vaccine, signaling the need of a new, more effective vaccine effective against DENV2. Other tetravalent live-attenuated vaccines are under development in phase II and phase III clinical trials, and other vaccine candidates (based on subunit, DNA and purified inactivated virus platforms) are at earlier stages of clinical development, although the ability of these vaccine candidates to provide broad serotype protection has not been demonstrated.

[0281] Embodiments of the present disclosure provide RNA (e.g., mRNA) vaccines that include at least one RNA polynucleotide encoding a Dengue virus (DENV) antigen. Dengue virus is a mosquito-borne (Aedes aegypti/Aedes albopictus) member of the family Flaviviridae (positive-sense, single-stranded RNA virus). The dengue virus genome encodes ten genes and is translated as a single polypeptide which is cut into ten proteins: the capsid, envelope, membrane, and nonstructural proteins (NS1, NS2A, NS2B, NS3, SN4A, NS4B, and NS5 proteins). The virus' main antigen is DENV envelope (E) protein, which is a component of the viral surface and is thought to facilitate the binding of the virus to cellular receptors (Heinz et al., Virology. 1983, 126:525). There are four similar but distinct serotypes of dengue virus (DENV-1, DENV-2, DENV-3, DENV-4, and DENV-5), which result annually in an estimated 50-100 million cases of dengue fever and 500,000 cases of the more severe dengue hemorrhagic fever/dengue shock syndrome (DHF/DSS) (Gubler et al., Adv Virus Res. 1999, 53:35-70). The four serotypes show immunological cross-reactivity, but are distinguishable in plaque reduction neutralization tests and by their respective monoclonal antibodies. The dengue virus E protein includes a serotype-specific antigenic determinant and determinants necessary for virus neutralization (Mason et al., J Gen Virol. 1990, 71:2107-2114).

[0282] After inoculation, the dendritic cells become infected and travel to lymph nodes. Monocytes and macrophages are also targeted shortly thereafter. Generally, the infected individual will be protected against homotypic reinfection for life; however, the individual will only be protected against other serotypes for a few weeks or months (Sabin, Am J Trop Med Hyg. 1952, 1:30-50). In fact, DHF/DSS is generally found in children and adults infected with a dengue virus serotype differing from their respective primary infection. Thus, it is necessary to develop a vaccine that provides immunity to all four serotypes.

[0283] The DENV E (envelope) protein is found on the viral surface and plays a role in the initial attachment of the viral particle to the host cell. Several molecules which interact with the viral E protein (ICAM3-grabbing non-integrin, CD209, Rab 5, GRP 78, and the mannose receptor) are thought to be important factors mediating attachment and viral entry.

[0284] The DENV prM (membrane) protein is important in the formation and maturation of the viral particle. The membrane protein consists of seven antiparallel β-strands stabilized by three disulfide bonds. The glycoprotein shell of the mature DENV virion consists of 180 copies each of the E protein and M protein. The immature virion comprises E and prM proteins, which form 90 heterodimer spikes on the exterior of the viral particle. The immature viral particle buds into the endoplasmic reticulum and eventually travels via the secretory pathway to the Golgi apparatus. As the virion passes through the trans-Golgi Network (TGN), it is exposed to an acidic environment which causes a conformational change in the E protein which causes it to disassociate from the prM protein and form E homodimers. During the maturation phase, the pr peptide is cleaved from the M peptide by the host protease, furin. The M protein then acts as a transmembrane protein under the E-protein shell of the mature virion. The pr peptide remains associated with the E protein until the viral particle is released into the extracellular environment, acting like a cap covering the hydrophobic fusion loop of the E protein until the viral particle has exited the cell.

[0285] The DENV NS3 is a serine protease, as well as an RNA helicase and RTPase/NTPase. The protease domain consists of six β-strands arranged into two β-barrels formed by residues 1-180 of the protein. The catalytic triad (His-51, Asp-75 and Ser-135), is found between these two β-barrels, and its activity is dependent on the presence of the NS2B cofactor which wraps around the NS3 protease domain and becomes part of the active site. The remaining NS3 residues (180-618), form the three subdomains of the DENV helicase. A six-stranded parallel β-sheet surrounded by four α-helices make up subdomains I and II, and subdomain III is composed of 4 α-helices surrounded by three shorter α-helices and two antiparallel β-strands.

### Chikungunya Virus (CHIKV)

[0286] Presently, CHIKV is a re-emerging human pathogen that has now established itself in Southeast Asia and has more recently spread to Europe. The Chikungunya virus (CHIKV) was introduced into Asia around 1958, and sites of endemic transmission within Southeastern Asia, including the Indian Ocean, were observed through 1996. The CHIKV epidemic moved throughout Asia, reaching Europe and Africa in the early 2000s, and was imported via travelers to North America and South America from 2005 to 2007. Sporadic outbreaks are still occurring in several countries, such as Italy, infecting naive populations. Singapore, for instance, experienced two successive waves of Chikungunya virus outbreaks in January and August 2008. Of the two strain lineages of CHIKV, the African strain remains enzootic by cycling between mosquitoes and monkeys, but the Asian strain is transmitted directly between mosquitoes and humans. This cycle of transmission may have allowed the virus to become more pathogenic as the reservoir host was eliminated.

[0287] In humans, CHIKV causes a debilitating disease characterized by fever, headache, nausea, vomiting, fatigue, rash, muscle pain and joint pain. Following the acute phase of the illness, patients develop severe chronic symptoms lasting from several weeks to months, including fatigue, incapacitating joint pain and polyarthritis.

[0288] The re-emergence of CHIKV has caused millions of cases throughout countries around the Indian Ocean and in Southeast Asia. Specifically, India, Indonesia, Maldives, Myanmar and Thailand have reported over 1.9 million cases since 2005. Globally, human CHIKV epidemics from 2004-2011 have resulted in 1.4-6.5 million reported cases, including a number of deaths. Thus, CHIKV remains a public threat that constitutes a major public health problem with severe social and economic impact.

[0289] Despite significant morbidity and some cases of mortality associated with CHIKV infection and its growing prevalence and geographic distribution, there is currently no licensed CHIKV vaccine or antiviral approved for human use. Several potential CHIKV vaccine candidates have been tested in humans and animals with varying success.

[0290] Chikungunya virus is a small (about 60-70 nm diameter), spherical, enveloped, positive-strand RNA virus having a capsid with icosahedral symmetry. The virion consists of an envelope and a nucleocapsid. The virion RNA is infectious and serves as both genome and viral messenger RNA. The genome is a linear, ssRNA (+) genome of 11,805 nucleotides which encodes two polyproteins that are processed by host and viral proteases into non-structural proteins (nsP1, nsP2, nsP3, and RdRpnsP4) necessary for RNA synthesis (replication and transcription) and structural proteins (capsid and envelope proteins C, E3, E2, 6K, and E1) which attach to host receptors and mediate endocytosis of virus into the host cell. The E1 and E2 glycoproteins form heterodimers that associate as 80 trimeric spikes on the viral surface covering the surface evenly. The envelope glycoproteins play a role in attachment to cells. The capsid protein possesses a protease activity that results in its self-cleavage from the nascent structural protein. Following its cleavage, the capsid protein binds to viral RNA and rapidly assembles into icosahedric core particles. The resulting nucleocapsid eventually associates with the cytoplasmic domain of E2 at the cell membrane, leading to budding and formation of mature virions.

[0291] E2 is an envelope glycoprotein responsible for viral attachment to target host cell, by binding to the cell receptor. E2 is synthesized as a p62 precursor which is processed at the cell membrane prior to virion budding, giving rise to an E2-E1 heterodimer. The C-terminus of E2 is involved in budding by interacting with capsid proteins.

[0292] E1 is an envelope glycoprotein with fusion activity, which is inactive as long as E1 is bound to E2 in the mature virion. Following virus attachment to target cell and endocytosis, acidification of the endosome induces dissociation of the E1/E2 heterodimer and concomitant trimerization of the E1 subunits. The E1 trimer is fusion active and promotes the release of the viral nucleocapsid in the cytoplasm after endosome and viral membrane fusion.

[0293] E3 is an accessory protein that functions as a membrane translocation/transport signal for E1 and E2.

[0294] 6K is another accessory protein involved in virus glycoprotein processing, cell permeabilization, and the budding of viral particles. Like E3, it functions as a membrane transport signal for E1 and E2.

[0295] The CHIKV structural proteins have been shown to be antigenic, which proteins, fragments, and epitopes thereof are encompassed within the invention. A phylogenetic tree of Chikungunya virus strains derived from complete concatenated open reading frames for the nonstructural and structural polyproteins shows key envelope glycoprotein E1 amino acid substitutions that facilitated (Indian Ocean lineage) or prevented (Asian lineage) adaptation to Aedes albopictus. There are membrane-bound and secreted forms of E1 and E2, as well as the full length polyprotein antigen (C-E3-E2-6K-E1), which retains the protein's native conformation. Additionally, the different Chikungunya genotypes, strains and isolates can also yield different antigens, which are functional in the constructs of the invention. For example, there are several different Chikungunya genotypes: Indian Ocean, East/Central/South African (ECSA), Asian, West African, and the Brazilian isolates (ECSA/Asian). There are three main Chikungunya genotype. These are ESCA (East-South-Central Africa), Asia, and West Africa. While sometimes names differ in publications, all belong to these three geographical strains.

[0296] The entire contents of International Application No. PCT/US2015/02740 is incorporated herein by reference.

### Combination Vaccines

[0297] Embodiments of the present disclosure also provide combination RNA (e.g., mRNA) vaccines. A “combination RNA (e.g., mRNA) vaccine” of the present disclosure refers to a vaccine comprising at least one (e.g., at least 2, 3, 4, 5, 6, 7, 8, 9 or 10) RNA (e.g., mRNA) polynucleotide having an open reading frame encoding a combination of at least one Malaria (e.g., P. falciparum, P. vivax, P. malariae and/or P. ovale) antigenic polypeptide, at least one JEV antigenic polypeptide, at least one WNV antigenic polypeptide, at least one EEEV antigenic polypeptide, at least one VEEV antigenic polypeptide, at least one SINV antigenic polypeptide, at least on CHIKV antigenic polypeptide, at least one DENV antigenic polypeptide, at least one ZIKV antigenic polypeptide, at least one YFV antigenic polypeptide, or any combination of two, three, four, five, six, seven, eight, nine, ten or more of the foregoing antigenic polypeptides.

[0298] In some embodiments, a combination RNA (e.g., mRNA) vaccine comprises a RNA (e.g., mRNA) polynucleotide encoding a Malaria (e.g., P. falciparum, P. vivax, P. malariae and/or P. ovale) antigenic polypeptide, a JEV antigenic polypeptide, a WNV antigenic polypeptide, a EEEV antigenic polypeptide, a VEEV antigenic polypeptide, a SINV antigenic polypeptide, a CHIKV antigenic polypeptide, a DENV antigenic polypeptide, a ZIKV antigenic polypeptide and a YFV antigenic polypeptide.

[0299] In some embodiments, a combination RNA (e.g., mRNA) vaccine comprises a RNA (e.g., mRNA) polynucleotide encoding a Malaria (e.g., P. falciparum, P. vivax, P. malariae and/or P. ovale) antigenic polypeptide and a JEV antigenic polypeptide.

[0300] In some embodiments, a combination RNA (e.g., mRNA) vaccine comprises a RNA (e.g., mRNA) polynucleotide encoding a Malaria (e.g., P. falciparum, P. vivax, P. malariae and/or P. ovale) antigenic polypeptide and a WNV antigenic polypeptide.

[0301] In some embodiments, a combination RNA (e.g., mRNA) vaccine comprises a RNA (e.g., mRNA) polynucleotide encoding a Malaria (e.g., P. falciparum, P. vivax, P. malariae and/or P. ovale) antigenic polypeptide and a EEEV antigenic polypeptide.

[0302] In some embodiments, a combination RNA (e.g., mRNA) vaccine comprises a RNA (e.g., mRNA) polynucleotide encoding a Malaria (e.g., P. falciparum, P. vivax, P. malariae and/or P. ovale) antigenic polypeptide and a VEEV antigenic polypeptide.

[0303] In some embodiments, a combination RNA (e.g., mRNA) vaccine comprises a RNA (e.g., mRNA) polynucleotide encoding a Malaria (e.g., P. falciparum, P. vivax, P. malariae and/or P. ovale) antigenic polypeptide and a SINV antigenic polypeptide.

[0304] In some embodiments, a combination RNA (e.g., mRNA) vaccine comprises a RNA (e.g., mRNA) polynucleotide encoding a Malaria (e.g., P. falciparum, P. vivax, P. malariae and/or P. ovale) antigenic polypeptide and a CHIKV antigenic polypeptide.

[0305] In some embodiments, a combination RNA (e.g., mRNA) vaccine comprises a RNA (e.g., mRNA) polynucleotide encoding a Malaria (e.g., P. falciparum, P. vivax, P. malariae and/or P. ovale) antigenic polypeptide and a DENV antigenic polypeptide.

[0306] In some embodiments, a combination RNA (e.g., mRNA) vaccine comprises a RNA (e.g., mRNA) polynucleotide encoding a Malaria (e.g., P. falciparum, P. vivax, P. malariae and/or P. ovale) antigenic polypeptide and a ZIKV antigenic polypeptide.

[0307] In some embodiments, a combination RNA (e.g., mRNA) vaccine comprises a RNA (e.g., mRNA) polynucleotide encoding a Malaria (e.g., P. falciparum, P. vivax, P. malariae and/or P. ovale) antigenic polypeptide and a YFV antigenic polypeptide.

[0308] In some embodiments, a combination RNA (e.g., mRNA) vaccine comprises a RNA (e.g., mRNA) polynucleotide encoding a JEV antigenic polypeptide and a WNV antigenic polypeptide.

[0309] In some embodiments, a combination RNA (e.g., mRNA) vaccine comprises a RNA (e.g., mRNA) polynucleotide encoding a JEV antigenic polypeptide and a EEEV antigenic polypeptide.

[0310] In some embodiments, a combination RNA (e.g., mRNA) vaccine comprises a RNA (e.g., mRNA) polynucleotide encoding a JEV antigenic polypeptide and a VEEV antigenic polypeptide.

[0311] In some embodiments, a combination RNA (e.g., mRNA) vaccine comprises a RNA (e.g., mRNA) polynucleotide encoding a JEV antigenic polypeptide and a SINV antigenic polypeptide.

[0312] In some embodiments, a combination RNA (e.g., mRNA) vaccine comprises a RNA (e.g., mRNA) polynucleotide encoding a JEV antigenic polypeptide and a CHIKV antigenic polypeptide.

[0313] In some embodiments, a combination RNA (e.g., mRNA) vaccine comprises a RNA (e.g., mRNA) polynucleotide encoding a JEV antigenic polypeptide and a DENV antigenic polypeptide.

[0314] In some embodiments, a combination RNA (e.g., mRNA) vaccine comprises a RNA (e.g., mRNA) polynucleotide encoding a JEV antigenic polypeptide and a ZIKV antigenic polypeptide.

[0315] In some embodiments, a combination RNA (e.g., mRNA) vaccine comprises a RNA (e.g., mRNA) polynucleotide encoding a JEV antigenic polypeptide and a YFV antigenic polypeptide.

[0316] In some embodiments, a combination RNA (e.g., mRNA) vaccine comprises a RNA (e.g., mRNA) polynucleotide encoding a WNV antigenic polypeptide and a EEEV antigenic polypeptide.

[0317] In some embodiments, a combination RNA (e.g., mRNA) vaccine comprises a RNA (e.g., mRNA) polynucleotide encoding a WNV antigenic polypeptide and a VEEV antigenic polypeptide.

[0318] In some embodiments, a combination RNA (e.g., mRNA) vaccine comprises a RNA (e.g., mRNA) polynucleotide encoding a WNV antigenic polypeptide and a SINV antigenic polypeptide.

[0319] In some embodiments, a combination RNA (e.g., mRNA) vaccine comprises a RNA (e.g., mRNA) polynucleotide encoding a WNV antigenic polypeptide and a CHIKV antigenic polypeptide.

[0320] In some embodiments, a combination RNA (e.g., mRNA) vaccine comprises a RNA (e.g., mRNA) polynucleotide encoding a WNV antigenic polypeptide and a DENV antigenic polypeptide.

[0321] In some embodiments, a combination RNA (e.g., mRNA) vaccine comprises a RNA (e.g., mRNA) polynucleotide encoding a WNV antigenic polypeptide and a ZIKV antigenic polypeptide.

[0322] In some embodiments, a combination RNA (e.g., mRNA) vaccine comprises a RNA (e.g., mRNA) polynucleotide encoding a WNV antigenic polypeptide and a YFV antigenic polypeptide.

[0323] In some embodiments, a combination RNA (e.g., mRNA) vaccine comprises a RNA (e.g., mRNA) polynucleotide encoding a EEEV antigenic polypeptide and a VEEV antigenic polypeptide.

[0324] In some embodiments, a combination RNA (e.g., mRNA) vaccine comprises a RNA (e.g., mRNA) polynucleotide encoding a EEEV antigenic polypeptide and a SINV antigenic polypeptide.

[0325] In some embodiments, a combination RNA (e.g., mRNA) vaccine comprises a RNA (e.g., mRNA) polynucleotide encoding a EEEV antigenic polypeptide and a CHIKV antigenic polypeptide.

[0326] In some embodiments, a combination RNA (e.g., mRNA) vaccine comprises a RNA (e.g., mRNA) polynucleotide encoding a EEEV antigenic polypeptide and a DENV antigenic polypeptide.

[0327] In some embodiments, a combination RNA (e.g., mRNA) vaccine comprises a RNA (e.g., mRNA) polynucleotide encoding a EEEV antigenic polypeptide and a ZIKV antigenic polypeptide.

[0328] In some embodiments, a combination RNA (e.g., mRNA) vaccine comprises a RNA (e.g., mRNA) polynucleotide encoding a EEEV antigenic polypeptide and a YFV antigenic polypeptide.

[0329] In some embodiments, a combination RNA (e.g., mRNA) vaccine comprises a RNA (e.g., mRNA) polynucleotide encoding a VEEV antigenic polypeptide and a SINV antigenic polypeptide.

[0330] In some embodiments, a combination RNA (e.g., mRNA) vaccine comprises a RNA (e.g., mRNA) polynucleotide encoding a VEEV antigenic polypeptide and a CHIKV antigenic polypeptide.

[0331] In some embodiments, a combination RNA (e.g., mRNA) vaccine comprises a RNA (e.g., mRNA) polynucleotide encoding a VEEV antigenic polypeptide and a DENV antigenic polypeptide.

[0332] In some embodiments, a combination RNA (e.g., mRNA) vaccine comprises a RNA (e.g., mRNA) polynucleotide encoding a VEEV antigenic polypeptide and a ZIKV antigenic polypeptide.

[0333] In some embodiments, a combination RNA (e.g., mRNA) vaccine comprises a RNA (e.g., mRNA) polynucleotide encoding a VEEV antigenic polypeptide and a YFV antigenic polypeptide.

[0334] In some embodiments, a combination RNA (e.g., mRNA) vaccine comprises a RNA (e.g., mRNA) polynucleotide encoding a SINV antigenic polypeptide and a CHIKV antigenic polypeptide.

[0335] In some embodiments, a combination RNA (e.g., mRNA) vaccine comprises a RNA (e.g., mRNA) polynucleotide encoding a SINV antigenic polypeptide and a DENV antigenic polypeptide.

[0336] In some embodiments, a combination RNA (e.g., mRNA) vaccine comprises a RNA (e.g., mRNA) polynucleotide encoding a SINV antigenic polypeptide and a ZIKV antigenic polypeptide.

[0337] In some embodiments, a combination RNA (e.g., mRNA) vaccine comprises a RNA (e.g., mRNA) polynucleotide encoding a SINV antigenic polypeptide and a YFV antigenic polypeptide.

[0338] In some embodiments, a combination RNA (e.g., mRNA) vaccine comprises a RNA (e.g., mRNA) polynucleotide encoding a CHIKV antigenic polypeptide and a DENV antigenic polypeptide.

[0339] In some embodiments, a combination RNA (e.g., mRNA) vaccine comprises a RNA (e.g., mRNA) polynucleotide encoding a CHIKV antigenic polypeptide and a ZIKV antigenic polypeptide.

[0340] In some embodiments, a combination RNA (e.g., mRNA) vaccine comprises a RNA (e.g., mRNA) polynucleotide encoding a CHIKV antigenic polypeptide and a YFV antigenic polypeptide.

[0341] In some embodiments, a combination RNA (e.g., mRNA) vaccine comprises a RNA (e.g., mRNA) polynucleotide encoding a DENV antigenic polypeptide and a ZIKV antigenic polypeptide.

[0342] In some embodiments, a combination RNA (e.g., mRNA) vaccine comprises a RNA (e.g., mRNA) polynucleotide encoding a DENV antigenic polypeptide and a YFV antigenic polypeptide.

[0343] In some embodiments, a combination RNA (e.g., mRNA) vaccine comprises a RNA (e.g., mRNA) polynucleotide encoding a ZIKV antigenic polypeptide and a YFV antigenic polypeptide.

[0344] In some embodiments, a combination RNA (e.g., mRNA) vaccine comprises a RNA (e.g., mRNA) polynucleotide encoding a Malaria (e.g., P. falciparum, P. vivax, P. malariae and/or P. ovale) antigenic polypeptide, a JEV antigenic polypeptide and a WNV antigenic polypeptide.

[0345] In some embodiments, a combination RNA (e.g., mRNA) vaccine comprises a RNA (e.g., mRNA) polynucleotide encoding a Malaria (e.g., P. falciparum, P. vivax, P. malariae and/or P. ovale) antigenic polypeptide, a JEV antigenic polypeptide and a EEEV antigenic polypeptide.

[0346] In some embodiments, a combination RNA (e.g., mRNA) vaccine comprises a RNA (e.g., mRNA) polynucleotide encoding a Malaria (e.g., P. falciparum, P. vivax, P. malariae and/or P. ovale) antigenic polypeptide, a JEV antigenic polypeptide and a VEEV antigenic polypeptide.

[0347] In some embodiments, a combination RNA (e.g., mRNA) vaccine comprises a RNA (e.g., mRNA) polynucleotide encoding a Malaria (e.g., P. falciparum, P. vivax, P. malariae and/or P. ovale) antigenic polypeptide, a JEV antigenic polypeptide and a SINV antigenic polypeptide.

[0348] In some embodiments, a combination RNA (e.g., mRNA) vaccine comprises a RNA (e.g., mRNA) polynucleotide encoding a Malaria (e.g., P. falciparum, P. vivax, P. malariae and/or P. ovale) antigenic polypeptide, a JEV antigenic polypeptide and a CHIKV antigenic polypeptide.

[0349] In some embodiments, a combination RNA (e.g., mRNA) vaccine comprises a RNA (e.g., mRNA) polynucleotide encoding a Malaria (e.g., P. falciparum, P. vivax, P. malariae and/or P. ovale) antigenic polypeptide, a JEV antigenic polypeptide and a DENV antigenic polypeptide.

[0350] In some embodiments, a combination RNA (e.g., mRNA) vaccine comprises a RNA (e.g., mRNA) polynucleotide encoding a Malaria (e.g., P. falciparum, P. vivax, P. malariae and/or P. ovale) antigenic polypeptide, a JEV antigenic polypeptide and a ZIKV antigenic polypeptide.

[0351] In some embodiments, a combination RNA (e.g., mRNA) vaccine comprises a RNA (e.g., mRNA) polynucleotide encoding a Malaria (e.g., P. falciparum, P. vivax, P. malariae and/or P. ovale) antigenic polypeptide, a JEV antigenic polypeptide and a YFV antigenic polypeptide.

[0352] In some embodiments, a combination RNA (e.g., mRNA) vaccine comprises a RNA (e.g., mRNA) polynucleotide encoding a Malaria (e.g., P. falciparum, P. vivax, P. malariae and/or P. ovale) antigenic polypeptide, a WNV antigenic polypeptide and a EEEV antigenic polypeptide.

[0353] In some embodiments, a combination RNA (e.g., mRNA) vaccine comprises a RNA (e.g., mRNA) polynucleotide encoding a Malaria (e.g., P. falciparum, P. vivax, P. malariae and/or P. ovale) antigenic polypeptide, a WNV antigenic polypeptide and a VEEV antigenic polypeptide.

[0354] In some embodiments, a combination RNA (e.g., mRNA) vaccine comprises a RNA (e.g., mRNA) polynucleotide encoding a Malaria (e.g., P. falciparum, P. vivax, P. malariae and/or P. ovale) antigenic polypeptide, a WNV antigenic polypeptide and a SINV antigenic polypeptide.

[0355] In some embodiments, a combination RNA (e.g., mRNA) vaccine comprises a RNA (e.g., mRNA) polynucleotide encoding a Malaria (e.g., P. falciparum, P. vivax, P. malariae and/or P. ovale) antigenic polypeptide, a WNV antigenic polypeptide and a CHIKV antigenic polypeptide.

[0356] In some embodiments, a combination RNA (e.g., mRNA) vaccine comprises a RNA (e.g., mRNA) polynucleotide encoding a Malaria (e.g., P. falciparum, P. vivax, P. malariae and/or P. ovale) antigenic polypeptide, a WNV antigenic polypeptide and a DENV antigenic polypeptide.

[0357] In some embodiments, a combination RNA (e.g., mRNA) vaccine comprises a RNA (e.g., mRNA) polynucleotide encoding a Malaria (e.g., P. falciparum, P. vivax, P. malariae and/or P. ovale) antigenic polypeptide, a WNV antigenic polypeptide and a ZIKV antigenic polypeptide.

[0358] In some embodiments, a combination RNA (e.g., mRNA) vaccine comprises a RNA (e.g., mRNA) polynucleotide encoding a Malaria (e.g., P. falciparum, P. vivax, P. malariae and/or P. ovale) antigenic polypeptide, a WNV antigenic polypeptide and a YFV antigenic polypeptide.

[0359] In some embodiments, a combination RNA (e.g., mRNA) vaccine comprises a RNA (e.g., mRNA) polynucleotide encoding a Malaria (e.g., P. falciparum, P. vivax, P. malariae and/or P. ovale) antigenic polypeptide, a EEEV antigenic polypeptide and a VEEV antigenic polypeptide.

[0360] In some embodiments, a combination RNA (e.g., mRNA) vaccine comprises a RNA (e.g., mRNA) polynucleotide encoding a Malaria (e.g., P. falciparum, P. vivax, P. malariae and/or P. ovale) antigenic polypeptide, a EEEV antigenic polypeptide and a SINV antigenic polypeptide.

[0361] In some embodiments, a combination RNA (e.g., mRNA) vaccine comprises a RNA (e.g., mRNA) polynucleotide encoding a Malaria (e.g., P. falciparum, P. vivax, P. malariae and/or P. ovale) antigenic polypeptide, a EEEV antigenic polypeptide and a CHIKV antigenic polypeptide.

[0362] In some embodiments, a combination RNA (e.g., mRNA) vaccine comprises a RNA (e.g., mRNA) polynucleotide encoding a Malaria (e.g., P. falciparum, P. vivax, P. malariae and/or P. ovale) antigenic polypeptide, a EEEV antigenic polypeptide and a DENV antigenic polypeptide.

[0363] In some embodiments, a combination RNA (e.g., mRNA) vaccine comprises a RNA (e.g., mRNA) polynucleotide encoding a Malaria (e.g., P. falciparum, P. vivax, P. malariae and/or P. ovale) antigenic polypeptide, a EEEV antigenic polypeptide and a ZIKV antigenic polypeptide.

[0364] In some embodiments, a combination RNA (e.g., mRNA) vaccine comprises a RNA (e.g., mRNA) polynucleotide encoding a Malaria (e.g., P. falciparum, P. vivax, P. malariae and/or P. ovale) antigenic polypeptide, a EEEV antigenic polypeptide and a YFV antigenic polypeptide.

[0365] In some embodiments, a combination RNA (e.g., mRNA) vaccine comprises a RNA (e.g., mRNA) polynucleotide encoding a Malaria (e.g., P. falciparum, P. vivax, P. malariae and/or P. ovale) antigenic polypeptide, a VEEV antigenic polypeptide and a SINV antigenic polypeptide.

[0366] In some embodiments, a combination RNA (e.g., mRNA) vaccine comprises a RNA (e.g., mRNA) polynucleotide encoding a Malaria (e.g., P. falciparum, P. vivax, P. malariae and/or P. ovale) antigenic polypeptide, a VEEV antigenic polypeptide and a CHIKV antigenic polypeptide.

[0367] In some embodiments, a combination RNA (e.g., mRNA) vaccine comprises a RNA (e.g., mRNA) polynucleotide encoding a Malaria (e.g., P. falciparum, P. vivax, P. malariae and/or P. ovale) antigenic polypeptide, a VEEV antigenic polypeptide and a DENV antigenic polypeptide.

[0368] In some embodiments, a combination RNA (e.g., mRNA) vaccine comprises a RNA (e.g., mRNA) polynucleotide encoding a Malaria (e.g., P. falciparum, P. vivax, P. malariae and/or P. ovale) antigenic polypeptide, a VEEV antigenic polypeptide and a ZIKV antigenic polypeptide.

[0369] In some embodiments, a combination RNA (e.g., mRNA) vaccine comprises a RNA (e.g., mRNA) polynucleotide encoding a Malaria (e.g., P. falciparum, P. vivax, P. malariae and/or P. ovale) antigenic polypeptide, a VEEV antigenic polypeptide and a YFV antigenic polypeptide.

[0370] In some embodiments, a combination RNA (e.g., mRNA) vaccine comprises a RNA (e.g., mRNA) polynucleotide encoding a Malaria (e.g., P. falciparum, P. vivax, P. malariae and/or P. ovale) antigenic polypeptide, SINV antigenic polypeptide and a CHIKV antigenic polypeptide.

[0371] In some embodiments, a combination RNA (e.g., mRNA) vaccine comprises a RNA (e.g., mRNA) polynucleotide encoding a Malaria (e.g., P. falciparum, P. vivax, P. malariae and/or P. ovale) antigenic polypeptide, SINV antigenic polypeptide and a DENV antigenic polypeptide.

[0372] In some embodiments, a combination RNA (e.g., mRNA) vaccine comprises a RNA (e.g., mRNA) polynucleotide encoding a Malaria (e.g., P. falciparum, P. vivax, P. malariae and/or P. ovale) antigenic polypeptide, SINV antigenic polypeptide and a ZIKV antigenic polypeptide.

[0373] In some embodiments, a combination RNA (e.g., mRNA) vaccine comprises a RNA (e.g., mRNA) polynucleotide encoding a Malaria (e.g., P. falciparum, P. vivax, P. malariae and/or P. ovale) antigenic polypeptide, SINV antigenic polypeptide and a YFV antigenic polypeptide.

[0374] In some embodiments, a combination RNA (e.g., mRNA) vaccine comprises a RNA (e.g., mRNA) polynucleotide encoding a Malaria (e.g., P. falciparum, P. vivax, P. malariae and/or P. ovale) antigenic polypeptide, a CHIKV antigenic polypeptide and a DENV antigenic polypeptide.

[0375] In some embodiments, a combination RNA (e.g., mRNA) vaccine comprises a RNA (e.g., mRNA) polynucleotide encoding a Malaria (e.g., P. falciparum, P. vivax, P. malariae and/or P. ovale) antigenic polypeptide, a CHIKV antigenic polypeptide and a ZIKV antigenic polypeptide.

[0376] In some embodiments, a combination RNA (e.g., mRNA) vaccine comprises a RNA (e.g., mRNA) polynucleotide encoding a Malaria (e.g., P. falciparum, P. vivax, P. malariae and/or P. ovale) antigenic polypeptide, a CHIKV antigenic polypeptide and a YFV antigenic polypeptide.

[0377] In some embodiments, a combination RNA (e.g., mRNA) vaccine comprises a RNA (e.g., mRNA) polynucleotide encoding a Malaria (e.g., P. falciparum, P. vivax, P. malariae and/or P. ovale) antigenic polypeptide, a DENV antigenic polypeptide and a ZIKV antigenic polypeptide.

[0378] In some embodiments, a combination RNA (e.g., mRNA) vaccine comprises a RNA (e.g., mRNA) polynucleotide encoding a Malaria (e.g., P. falciparum, P. vivax, P. malariae and/or P. ovale) antigenic polypeptide, a DENV antigenic polypeptide and a YFV antigenic polypeptide.

[0379] In some embodiments, a combination RNA (e.g., mRNA) vaccine comprises a RNA (e.g., mRNA) polynucleotide encoding a Malaria (e.g., P. falciparum, P. vivax, P. malariae and/or P. ovale) antigenic polypeptide, a ZIKV antigenic polypeptide and a YFV antigenic polypeptide.

[0380] In some embodiments, a combination RNA (e.g., mRNA) vaccine comprises a RNA (e.g., mRNA) polynucleotide encoding a JEV antigenic polypeptide, a WNV antigenic polypeptide and a EEEV antigenic polypeptide.

[0381] In some embodiments, a combination RNA (e.g., mRNA) vaccine comprises a RNA (e.g., mRNA) polynucleotide encoding a JEV antigenic polypeptide, a WNV antigenic polypeptide and a VEEV antigenic polypeptide.

[0382] In some embodiments, a combination RNA (e.g., mRNA) vaccine comprises a RNA (e.g., mRNA) polynucleotide encoding a JEV antigenic polypeptide, a WNV antigenic polypeptide and a SINV antigenic polypeptide.

[0383] In some embodiments, a combination RNA (e.g., mRNA) vaccine comprises a RNA (e.g., mRNA) polynucleotide encoding a JEV antigenic polypeptide, a WNV antigenic polypeptide and a CHIKV antigenic polypeptide.

[0384] In some embodiments, a combination RNA (e.g., mRNA) vaccine comprises a RNA (e.g., mRNA) polynucleotide encoding a JEV antigenic polypeptide, a WNV antigenic polypeptide and a DENV antigenic polypeptide.

[0385] In some embodiments, a combination RNA (e.g., mRNA) vaccine comprises a RNA (e.g., mRNA) polynucleotide encoding a JEV antigenic polypeptide, a WNV antigenic polypeptide and a ZIKV antigenic polypeptide.

[0386] In some embodiments, a combination RNA (e.g., mRNA) vaccine comprises a RNA (e.g., mRNA) polynucleotide encoding a JEV antigenic polypeptide, a WNV antigenic polypeptide and a YFV antigenic polypeptide.

[0387] In some embodiments, a combination RNA (e.g., mRNA) vaccine comprises a RNA (e.g., mRNA) polynucleotide encoding a JEV antigenic polypeptide, a EEEV antigenic polypeptide and a VEEV antigenic polypeptide.

[0388] In some embodiments, a combination RNA (e.g., mRNA) vaccine comprises a RNA (e.g., mRNA) polynucleotide encoding a JEV antigenic polypeptide, a EEEV antigenic polypeptide and a SINV antigenic polypeptide.

[0389] In some embodiments, a combination RNA (e.g., mRNA) vaccine comprises a RNA (e.g., mRNA) polynucleotide encoding a JEV antigenic polypeptide, a EEEV antigenic polypeptide and a CHIKV antigenic polypeptide.

[0390] In some embodiments, a combination RNA (e.g., mRNA) vaccine comprises a RNA (e.g., mRNA) polynucleotide encoding a JEV antigenic polypeptide, a EEEV antigenic polypeptide and a DENV antigenic polypeptide.

[0391] In some embodiments, a combination RNA (e.g., mRNA) vaccine comprises a RNA (e.g., mRNA) polynucleotide encoding a JEV antigenic polypeptide, a EEEV antigenic polypeptide and a ZIKV antigenic polypeptide.

[0392] In some embodiments, a combination RNA (e.g., mRNA) vaccine comprises a RNA (e.g., mRNA) polynucleotide encoding a JEV antigenic polypeptide, a EEEV antigenic polypeptide and a YFV antigenic polypeptide.

[0393] In some embodiments, a combination RNA (e.g., mRNA) vaccine comprises a RNA (e.g., mRNA) polynucleotide encoding a JEV antigenic polypeptide, a VEEV antigenic polypeptide and a SINV antigenic polypeptide.

[0394] In some embodiments, a combination RNA (e.g., mRNA) vaccine comprises a RNA (e.g., mRNA) polynucleotide encoding a JEV antigenic polypeptide, a VEEV antigenic polypeptide and a CHIKV antigenic polypeptide.

[0395] In some embodiments, a combination RNA (e.g., mRNA) vaccine comprises a RNA (e.g., mRNA) polynucleotide encoding a JEV antigenic polypeptide, a VEEV antigenic polypeptide and a DENV antigenic polypeptide.

[0396] In some embodiments, a combination RNA (e.g., mRNA) vaccine comprises a RNA (e.g., mRNA) polynucleotide encoding a JEV antigenic polypeptide, a VEEV antigenic polypeptide and a ZIKV antigenic polypeptide.

[0397] In some embodiments, a combination RNA (e.g., mRNA) vaccine comprises a RNA (e.g., mRNA) polynucleotide encoding a JEV antigenic polypeptide, a VEEV antigenic polypeptide and a YFV antigenic polypeptide.

[0398] In some embodiments, a combination RNA (e.g., mRNA) vaccine comprises a RNA (e.g., mRNA) polynucleotide encoding a JEV antigenic polypeptide, a SINV antigenic polypeptide and a CHIKV antigenic polypeptide.

[0399] In some embodiments, a combination RNA (e.g., mRNA) vaccine comprises a RNA (e.g., mRNA) polynucleotide encoding a JEV antigenic polypeptide, a SINV antigenic polypeptide and DENV antigenic polypeptide.

[0400] In some embodiments, a combination RNA (e.g., mRNA) vaccine comprises a RNA (e.g., mRNA) polynucleotide encoding a JEV antigenic polypeptide, a SINV antigenic polypeptide and a ZIKV antigenic polypeptide.

[0401] In some embodiments, a combination RNA (e.g., mRNA) vaccine comprises a RNA (e.g., mRNA) polynucleotide encoding a JEV antigenic polypeptide, a SINV antigenic polypeptide and a YFV antigenic polypeptide.

[0402] In some embodiments, a combination RNA (e.g., mRNA) vaccine comprises a RNA (e.g., mRNA) polynucleotide encoding a JEV antigenic polypeptide, CHIKV antigenic polypeptide and a DENV antigenic polypeptide.

[0403] In some embodiments, a combination RNA (e.g., mRNA) vaccine comprises a RNA (e.g., mRNA) polynucleotide encoding a JEV antigenic polypeptide, CHIKV antigenic polypeptide and a ZIKV antigenic polypeptide.

[0404] In some embodiments, a combination RNA (e.g., mRNA) vaccine comprises a RNA (e.g., mRNA) polynucleotide encoding a JEV antigenic polypeptide, CHIKV antigenic polypeptide and a YFV antigenic polypeptide.

[0405] In some embodiments, a combination RNA (e.g., mRNA) vaccine comprises a RNA (e.g., mRNA) polynucleotide encoding a JEV antigenic polypeptide, a DENV antigenic polypeptide and a ZIKV antigenic polypeptide.

[0406] In some embodiments, a combination RNA (e.g., mRNA) vaccine comprises a RNA (e.g., mRNA) polynucleotide encoding a JEV antigenic polypeptide, a DENV antigenic polypeptide and a YFV antigenic polypeptide.

[0407] In some embodiments, a combination RNA (e.g., mRNA) vaccine comprises a RNA (e.g., mRNA) polynucleotide encoding a JEV antigenic polypeptide, a ZIKV antigenic polypeptide and a YFV antigenic polypeptide.

[0408] In some embodiments, a combination RNA (e.g., mRNA) vaccine comprises a RNA (e.g., mRNA) polynucleotide encoding a WNV antigenic polypeptide, a EEEV antigenic polypeptide and a VEEV antigenic polypeptide.

[0409] In some embodiments, a combination RNA (e.g., mRNA) vaccine comprises a RNA (e.g., mRNA) polynucleotide encoding a WNV antigenic polypeptide, a EEEV antigenic polypeptide and a SINV antigenic polypeptide.

[0410] In some embodiments, a combination RNA (e.g., mRNA) vaccine comprises a RNA (e.g., mRNA) polynucleotide encoding a WNV antigenic polypeptide, a EEEV antigenic polypeptide and a CHIKV antigenic polypeptide.

[0411] In some embodiments, a combination RNA (e.g., mRNA) vaccine comprises a RNA (e.g., mRNA) polynucleotide encoding a WNV antigenic polypeptide, a EEEV antigenic polypeptide and a DENV antigenic polypeptide.

[0412] In some embodiments, a combination RNA (e.g., mRNA) vaccine comprises a RNA (e.g., mRNA) polynucleotide encoding a WNV antigenic polypeptide, a EEEV antigenic polypeptide and a ZIKV antigenic polypeptide.

[0413] In some embodiments, a combination RNA (e.g., mRNA) vaccine comprises a RNA (e.g., mRNA) polynucleotide encoding a WNV antigenic polypeptide, a EEEV antigenic polypeptide and a YFV antigenic polypeptide.

[0414] In some embodiments, a combination RNA (e.g., mRNA) vaccine comprises a RNA (e.g., mRNA) polynucleotide encoding WNV antigenic polypeptide, a VEEV antigenic polypeptide and a SINV antigenic polypeptide.

[0415] In some embodiments, a combination RNA (e.g., mRNA) vaccine comprises a RNA (e.g., mRNA) polynucleotide encoding WNV antigenic polypeptide, a VEEV antigenic polypeptide and a CHIKV antigenic polypeptide.

[0416] In some embodiments, a combination RNA (e.g., mRNA) vaccine comprises a RNA (e.g., mRNA) polynucleotide encoding WNV antigenic polypeptide, a VEEV antigenic polypeptide and a DENV antigenic polypeptide.

[0417] In some embodiments, a combination RNA (e.g., mRNA) vaccine comprises a RNA (e.g., mRNA) polynucleotide encoding WNV antigenic polypeptide, a VEEV antigenic polypeptide and a ZIKV antigenic polypeptide.

[0418] In some embodiments, a combination RNA (e.g., mRNA) vaccine comprises a RNA (e.g., mRNA) polynucleotide encoding WNV antigenic polypeptide, a VEEV antigenic polypeptide and a YFV antigenic polypeptide.

[0419] In some embodiments, a combination RNA (e.g., mRNA) vaccine comprises a RNA (e.g., mRNA) polynucleotide encoding a WNV antigenic polypeptide, a SINV antigenic polypeptide and a CHIKV antigenic polypeptide.

[0420] In some embodiments, a combination RNA (e.g., mRNA) vaccine comprises a RNA (e.g., mRNA) polynucleotide encoding a WNV antigenic polypeptide, a SINV antigenic polypeptide and a DENV antigenic polypeptide.

[0421] In some embodiments, a combination RNA (e.g., mRNA) vaccine comprises a RNA (e.g., mRNA) polynucleotide encoding a WNV antigenic polypeptide, a SINV antigenic polypeptide and a ZIKV antigenic polypeptide.

[0422] In some embodiments, a combination RNA (e.g., mRNA) vaccine comprises a RNA (e.g., mRNA) polynucleotide encoding a WNV antigenic polypeptide, a SINV antigenic polypeptide and a YFV antigenic polypeptide.

[0423] In some embodiments, a combination RNA (e.g., mRNA) vaccine comprises a RNA (e.g., mRNA) polynucleotide encoding a WNV antigenic polypeptide, a SINV antigenic polypeptide and a CHIKV antigenic polypeptide.

[0424] In some embodiments, a combination RNA (e.g., mRNA) vaccine comprises a RNA (e.g., mRNA) polynucleotide encoding a WNV antigenic polypeptide, a SINV antigenic polypeptide and a DENV antigenic polypeptide.

[0425] In some embodiments, a combination RNA (e.g., mRNA) vaccine comprises a RNA (e.g., mRNA) polynucleotide encoding a WNV antigenic polypeptide, a SINV antigenic polypeptide and a ZIKV antigenic polypeptide.

[0426] In some embodiments, a combination RNA (e.g., mRNA) vaccine comprises a RNA (e.g., mRNA) polynucleotide encoding a WNV antigenic polypeptide, a SINV antigenic polypeptide and a YFV antigenic polypeptide.

[0427] In some embodiments, a combination RNA (e.g., mRNA) vaccine comprises a RNA (e.g., mRNA) polynucleotide encoding a WNV antigenic polypeptide, a CHIKV antigenic polypeptide and a DENV antigenic polypeptide.

[0428] In some embodiments, a combination RNA (e.g., mRNA) vaccine comprises a RNA (e.g., mRNA) polynucleotide encoding a WNV antigenic polypeptide, a CHIKV antigenic polypeptide and a ZIKV antigenic polypeptide.

[0429] In some embodiments, a combination RNA (e.g., mRNA) vaccine comprises a RNA (e.g., mRNA) polynucleotide encoding a WNV antigenic polypeptide, a CHIKV antigenic polypeptide and a YFV antigenic polypeptide.

[0430] In some embodiments, a combination RNA (e.g., mRNA) vaccine comprises a RNA (e.g., mRNA) polynucleotide encoding a WNV antigenic polypeptide, a DENV antigenic polypeptide and a ZIKV antigenic polypeptide.

[0431] In some embodiments, a combination RNA (e.g., mRNA) vaccine comprises a RNA (e.g., mRNA) polynucleotide encoding a WNV antigenic polypeptide, a DENV antigenic polypeptide and YFV antigenic polypeptide.

[0432] In some embodiments, a combination RNA (e.g., mRNA) vaccine comprises a RNA (e.g., mRNA) polynucleotide encoding a WNV antigenic polypeptide, a ZIKV antigenic polypeptide and YFV antigenic polypeptide.

[0433] In some embodiments, a combination RNA (e.g., mRNA) vaccine comprises a RNA (e.g., mRNA) polynucleotide encoding a EEEV antigenic polypeptide, a VEEV antigenic polypeptide and a SINV antigenic polypeptide.

[0434] In some embodiments, a combination RNA (e.g., mRNA) vaccine comprises a RNA (e.g., mRNA) polynucleotide encoding a EEEV antigenic polypeptide, a VEEV antigenic polypeptide and a CHIKV antigenic polypeptide.

[0435] In some embodiments, a combination RNA (e.g., mRNA) vaccine comprises a RNA (e.g., mRNA) polynucleotide encoding a EEEV antigenic polypeptide, a VEEV antigenic polypeptide and a DENV antigenic polypeptide.

[0436] In some embodiments, a combination RNA (e.g., mRNA) vaccine comprises a RNA (e.g., mRNA) polynucleotide encoding a EEEV antigenic polypeptide, a VEEV antigenic polypeptide and a ZIKV antigenic polypeptide.

[0437] In some embodiments, a combination RNA (e.g., mRNA) vaccine comprises a RNA (e.g., mRNA) polynucleotide encoding a EEEV antigenic polypeptide, a VEEV antigenic polypeptide and a YFV antigenic polypeptide.

[0438] In some embodiments, a combination RNA (e.g., mRNA) vaccine comprises a RNA (e.g., mRNA) polynucleotide encoding a EEEV antigenic polypeptide, a SINV antigenic polypeptide and a CHIKV antigenic polypeptide.

[0439] In some embodiments, a combination RNA (e.g., mRNA) vaccine comprises a RNA (e.g., mRNA) polynucleotide encoding a EEEV antigenic polypeptide, a SINV antigenic polypeptide and a DENV antigenic polypeptide.

[0440] In some embodiments, a combination RNA (e.g., mRNA) vaccine comprises a RNA (e.g., mRNA) polynucleotide encoding a EEEV antigenic polypeptide, a SINV antigenic polypeptide and a ZIKV antigenic polypeptide.

[0441] In some embodiments, a combination RNA (e.g., mRNA) vaccine comprises a RNA (e.g., mRNA) polynucleotide encoding a EEEV antigenic polypeptide, a SINV antigenic polypeptide and a YFV antigenic polypeptide.

[0442] In some embodiments, a combination RNA (e.g., mRNA) vaccine comprises a RNA (e.g., mRNA) polynucleotide encoding a EEEV antigenic polypeptide, a CHIKV antigenic polypeptide and a DENV antigenic polypeptide.

[0443] In some embodiments, a combination RNA (e.g., mRNA) vaccine comprises a RNA (e.g., mRNA) polynucleotide encoding a EEEV antigenic polypeptide, a CHIKV antigenic polypeptide and a ZIKV antigenic polypeptide.

[0444] In some embodiments, a combination RNA (e.g., mRNA) vaccine comprises a RNA (e.g., mRNA) polynucleotide encoding a EEEV antigenic polypeptide, a CHIKV antigenic polypeptide and a YFV antigenic polypeptide.

[0445] In some embodiments, a combination RNA (e.g., mRNA) vaccine comprises a RNA (e.g., mRNA) polynucleotide encoding a EEEV antigenic polypeptide, a DENV antigenic polypeptide and a ZIKV antigenic polypeptide.

[0446] In some embodiments, a combination RNA (e.g., mRNA) vaccine comprises a RNA (e.g., mRNA) polynucleotide encoding a EEEV antigenic polypeptide, a DENV antigenic polypeptide and a YFV antigenic polypeptide.

[0447] In some embodiments, a combination RNA (e.g., mRNA) vaccine comprises a RNA (e.g., mRNA) polynucleotide encoding a EEEV antigenic polypeptide, a ZIKV antigenic polypeptide and a YFV antigenic polypeptide.

[0448] In some embodiments, a combination RNA (e.g., mRNA) vaccine comprises a RNA (e.g., mRNA) polynucleotide encoding a VEEV antigenic polypeptide, a SINV antigenic polypeptide and a CHIKV antigenic polypeptide.

[0449] In some embodiments, a combination RNA (e.g., mRNA) vaccine comprises a RNA (e.g., mRNA) polynucleotide encoding a VEEV antigenic polypeptide, a SINV antigenic polypeptide and a DENV antigenic polypeptide.

[0450] In some embodiments, a combination RNA (e.g., mRNA) vaccine comprises a RNA (e.g., mRNA) polynucleotide encoding a VEEV antigenic polypeptide, a SINV antigenic polypeptide and a ZIKV antigenic polypeptide.

[0451] In some embodiments, a combination RNA (e.g., mRNA) vaccine comprises a RNA (e.g., mRNA) polynucleotide encoding a VEEV antigenic polypeptide, a SINV antigenic polypeptide and a YFV antigenic polypeptide.

[0452] In some embodiments, a combination RNA (e.g., mRNA) vaccine comprises a RNA (e.g., mRNA) polynucleotide encoding a VEEV antigenic polypeptide, a CHIKV antigenic polypeptide and a DENV antigenic polypeptide.

[0453] In some embodiments, a combination RNA (e.g., mRNA) vaccine comprises a RNA (e.g., mRNA) polynucleotide encoding a VEEV antigenic polypeptide, a CHIKV antigenic polypeptide and a ZIKV antigenic polypeptide.

[0454] In some embodiments, a combination RNA (e.g., mRNA) vaccine comprises a RNA (e.g., mRNA) polynucleotide encoding a VEEV antigenic polypeptide, a CHIKV antigenic polypeptide and a YFV antigenic polypeptide.

[0455] In some embodiments, a combination RNA (e.g., mRNA) vaccine comprises a RNA (e.g., mRNA) polynucleotide encoding a VEEV antigenic polypeptide, a DENV antigenic polypeptide and a ZIKV antigenic polypeptide.

[0456] In some embodiments, a combination RNA (e.g., mRNA) vaccine comprises a RNA (e.g., mRNA) polynucleotide encoding a VEEV antigenic polypeptide, a DENV antigenic polypeptide and a YFV antigenic polypeptide.

[0457] In some embodiments, a combination RNA (e.g., mRNA) vaccine comprises a RNA (e.g., mRNA) polynucleotide encoding a VEEV antigenic polypeptide, a ZIKV antigenic polypeptide and a YFV antigenic polypeptide.

[0458] In some embodiments, a combination RNA (e.g., mRNA) vaccine comprises a RNA (e.g., mRNA) polynucleotide encoding a SINV antigenic polypeptide, a CHIKV antigenic polypeptide and a DENV antigenic polypeptide.

[0459] In some embodiments, a combination RNA (e.g., mRNA) vaccine comprises a RNA (e.g., mRNA) polynucleotide encoding a SINV antigenic polypeptide, a CHIKV antigenic polypeptide and a ZIKV antigenic polypeptide.

[0460] In some embodiments, a combination RNA (e.g., mRNA) vaccine comprises a RNA (e.g., mRNA) polynucleotide encoding a SINV antigenic polypeptide, a CHIKV antigenic polypeptide and a YFV antigenic polypeptide.

[0461] In some embodiments, a combination RNA (e.g., mRNA) vaccine comprises a RNA (e.g., mRNA) polynucleotide encoding a SINV antigenic polypeptide, a DENV antigenic polypeptide and a ZIKV antigenic polypeptide.

[0462] In some embodiments, a combination RNA (e.g., mRNA) vaccine comprises a RNA (e.g., mRNA) polynucleotide encoding a SINV antigenic polypeptide, a DENV antigenic polypeptide and a YFV antigenic polypeptide.

[0463] In some embodiments, a combination RNA (e.g., mRNA) vaccine comprises a RNA (e.g., mRNA) polynucleotide encoding a SINV antigenic polypeptide, a ZIKV antigenic polypeptide and a YFV antigenic polypeptide.

[0464] In some embodiments, a combination RNA (e.g., mRNA) vaccine comprises a RNA (e.g., mRNA) polynucleotide encoding a CHIKV antigenic polypeptide, a DENV antigenic polypeptide and a ZIKV antigenic polypeptide.

[0465] In some embodiments, a combination RNA (e.g., mRNA) vaccine comprises a RNA (e.g., mRNA) polynucleotide encoding a CHIKV antigenic polypeptide, a DENV antigenic polypeptide and a YFV antigenic polypeptide.

[0466] In some embodiments, a combination RNA (e.g., mRNA) vaccine comprises a RNA (e.g., mRNA) polynucleotide encoding a CHIKV antigenic polypeptide, a ZIKV antigenic polypeptide and a YFV antigenic polypeptide.

[0467] In some embodiments, a combination RNA (e.g., mRNA) vaccine comprises a RNA (e.g., mRNA) polynucleotide encoding a DENV antigenic polypeptide, a ZIKV antigenic polypeptide and a YFV antigenic polypeptide.

[0468] In some embodiments, a combination RNA (e.g., mRNA) vaccine comprises a RNA (e.g., mRNA) polynucleotide encoding a Malaria (e.g., P. falciparum, P. vivax, P. malariae and/or P. ovale) antigenic polypeptide, a JEV antigenic polypeptide, a WNV antigenic polypeptide and a EEEV antigenic polypeptide.

[0469] In some embodiments, a combination RNA (e.g., mRNA) vaccine comprises a RNA (e.g., mRNA) polynucleotide encoding a Malaria (e.g., P. falciparum, P. vivax, P. malariae and/or P. ovale) antigenic polypeptide, a JEV antigenic polypeptide, a WNV antigenic polypeptide and a VEEV antigenic polypeptide.

[0470] In some embodiments, a combination RNA (e.g., mRNA) vaccine comprises a RNA (e.g., mRNA) polynucleotide encoding a Malaria (e.g., P. falciparum, P. vivax, P. malariae and/or P. ovale) antigenic polypeptide, a JEV antigenic polypeptide, a WNV antigenic polypeptide and a SINV antigenic polypeptide.

[0471] In some embodiments, a combination RNA (e.g., mRNA) vaccine comprises a RNA (e.g., mRNA) polynucleotide encoding a Malaria (e.g., P. falciparum, P. vivax, P. malariae and/or P. ovale) antigenic polypeptide, a JEV antigenic polypeptide, a WNV antigenic polypeptide and a CHIKV antigenic polypeptide.

[0472] In some embodiments, a combination RNA (e.g., mRNA) vaccine comprises a RNA (e.g., mRNA) polynucleotide encoding a Malaria (e.g., P. falciparum, P. vivax, P. malariae and/or P. ovale) antigenic polypeptide, a JEV antigenic polypeptide, a WNV antigenic polypeptide and a DENV antigenic polypeptide.

[0473] In some embodiments, a combination RNA (e.g., mRNA) vaccine comprises a RNA (e.g., mRNA) polynucleotide encoding a Malaria (e.g., P. falciparum, P. vivax, P. malariae and/or P. ovale) antigenic polypeptide, a JEV antigenic polypeptide, a WNV antigenic polypeptide and a ZIKV antigenic polypeptide.

[0474] In some embodiments, a combination RNA (e.g., mRNA) vaccine comprises a RNA (e.g., mRNA) polynucleotide encoding a Malaria (e.g., P. falciparum, P. vivax, P. malariae and/or P. ovale) antigenic polypeptide, a JEV antigenic polypeptide, a WNV antigenic polypeptide and a YFV antigenic polypeptide.

[0475] In some embodiments, a combination RNA (e.g., mRNA) vaccine comprises a RNA (e.g., mRNA) polynucleotide encoding a Malaria (e.g., P. falciparum, P. vivax, P. malariae and/or P. ovale) antigenic polypeptide, a JEV antigenic polypeptide, a EEEV antigenic polypeptide and a VEEV antigenic polypeptide.

[0476] In some embodiments, a combination RNA (e.g., mRNA) vaccine comprises a RNA (e.g., mRNA) polynucleotide encoding a Malaria (e.g., P. falciparum, P. vivax, P. malariae and/or P. ovale) antigenic polypeptide, a JEV antigenic polypeptide, a EEEV antigenic polypeptide and a SINV antigenic polypeptide.

[0477] In some embodiments, a combination RNA (e.g., mRNA) vaccine comprises a RNA (e.g., mRNA) polynucleotide encoding a Malaria (e.g., P. falciparum, P. vivax, P. malariae and/or P. ovale) antigenic polypeptide, a JEV antigenic polypeptide, a EEEV antigenic polypeptide and a CHIKV antigenic polypeptide.

[0478] In some embodiments, a combination RNA (e.g., mRNA) vaccine comprises a RNA (e.g., mRNA) polynucleotide encoding a Malaria (e.g., P. falciparum, P. vivax, P. malariae and/or P. ovale) antigenic polypeptide, a JEV antigenic polypeptide, a EEEV antigenic polypeptide and a DENV antigenic polypeptide.

[0479] In some embodiments, a combination RNA (e.g., mRNA) vaccine comprises a RNA (e.g., mRNA) polynucleotide encoding a Malaria (e.g., P. falciparum, P. vivax, P. malariae and/or P. ovale) antigenic polypeptide, a JEV antigenic polypeptide, a EEEV antigenic polypeptide and a ZIKV antigenic polypeptide.

[0480] In some embodiments, a combination RNA (e.g., mRNA) vaccine comprises a RNA (e.g., mRNA) polynucleotide encoding a Malaria (e.g., P. falciparum, P. vivax, P. malariae and/or P. ovale) antigenic polypeptide, a JEV antigenic polypeptide, a EEEV antigenic polypeptide and a YFV antigenic polypeptide.

[0481] In some embodiments, a combination RNA (e.g., mRNA) vaccine comprises a RNA (e.g., mRNA) polynucleotide encoding a Malaria (e.g., P. falciparum, P. vivax, P. malariae and/or P. ovale) antigenic polypeptide, a JEV antigenic polypeptide and a VEEV antigenic polypeptide and a SINV antigenic polypeptide.

[0482] In some embodiments, a combination RNA (e.g., mRNA) vaccine comprises a RNA (e.g., mRNA) polynucleotide encoding a Malaria (e.g., P. falciparum, P. vivax, P. malariae and/or P. ovale) antigenic polypeptide, a JEV antigenic polypeptide and a VEEV antigenic polypeptide and a CHIKV antigenic polypeptide.

[0483] In some embodiments, a combination RNA (e.g., mRNA) vaccine comprises a RNA (e.g., mRNA) polynucleotide encoding a Malaria (e.g., P. falciparum, P. vivax, P. malariae and/or P. ovale) antigenic polypeptide, a JEV antigenic polypeptide and a VEEV antigenic polypeptide and a DENV antigenic polypeptide.

[0484] In some embodiments, a combination RNA (e.g., mRNA) vaccine comprises a RNA (e.g., mRNA) polynucleotide encoding a Malaria (e.g., P. falciparum, P. vivax, P. malariae and/or P. ovale) antigenic polypeptide, a JEV antigenic polypeptide and a VEEV antigenic polypeptide and a ZIKV antigenic polypeptide.

[0485] In some embodiments, a combination RNA (e.g., mRNA) vaccine comprises a RNA (e.g., mRNA) polynucleotide encoding a Malaria (e.g., P. falciparum, P. vivax, P. malariae and/or P. ovale) antigenic polypeptide, a JEV antigenic polypeptide and a VEEV antigenic polypeptide and a YFV antigenic polypeptide.

[0486] In some embodiments, a combination RNA (e.g., mRNA) vaccine comprises a RNA (e.g., mRNA) polynucleotide encoding a Malaria (e.g., P. falciparum, P. vivax, P. malariae and/or P. ovale) antigenic polypeptide, a JEV antigenic polypeptide, a SINV antigenic polypeptide and a CHIKV antigenic polypeptide.

[0487] In some embodiments, a combination RNA (e.g., mRNA) vaccine comprises a RNA (e.g., mRNA) polynucleotide encoding a Malaria (e.g., P. falciparum, P. vivax, P. malariae and/or P. ovale) antigenic polypeptide, a JEV antigenic polypeptide, a SINV antigenic polypeptide and a DENV antigenic polypeptide.

[0488] In some embodiments, a combination RNA (e.g., mRNA) vaccine comprises a RNA (e.g., mRNA) polynucleotide encoding a Malaria (e.g., P. falciparum, P. vivax, P. malariae and/or P. ovale) antigenic polypeptide, a JEV antigenic polypeptide, a SINV antigenic polypeptide and a ZIKV antigenic polypeptide.

[0489] In some embodiments, a combination RNA (e.g., mRNA) vaccine comprises a RNA (e.g., mRNA) polynucleotide encoding a Malaria (e.g., P. falciparum, P. vivax, P. malariae and/or P. ovale) antigenic polypeptide, a JEV antigenic polypeptide, a SINV antigenic polypeptide and a YFV antigenic polypeptide.

[0490] In some embodiments, a combination RNA (e.g., mRNA) vaccine comprises a RNA (e.g., mRNA) polynucleotide encoding a Malaria (e.g., P. falciparum, P. vivax, P. malariae and/or P. ovale) antigenic polypeptide, a JEV antigenic polypeptide, a CHIKV antigenic polypeptide and a DENV antigenic polypeptide.

[0491] In some embodiments, a combination RNA (e.g., mRNA) vaccine comprises a RNA (e.g., mRNA) polynucleotide encoding a Malaria (e.g., P. falciparum, P. vivax, P. malariae and/or P. ovale) antigenic polypeptide, a JEV antigenic polypeptide, a CHIKV antigenic polypeptide and a ZIKV antigenic polypeptide.

[0492] In some embodiments, a combination RNA (e.g., mRNA) vaccine comprises a RNA (e.g., mRNA) polynucleotide encoding a Malaria (e.g., P. falciparum, P. vivax, P. malariae and/or P. ovale) antigenic polypeptide, a JEV antigenic polypeptide, a CHIKV antigenic polypeptide and a YFV antigenic polypeptide.

[0493] In some embodiments, a combination RNA (e.g., mRNA) vaccine comprises a RNA (e.g., mRNA) polynucleotide encoding a Malaria (e.g., P. falciparum, P. vivax, P. malariae and/or P. ovale) antigenic polypeptide, a JEV antigenic polypeptide, a DENV antigenic polypeptide and a ZIKV antigenic polypeptide.

[0494] In some embodiments, a combination RNA (e.g., mRNA) vaccine comprises a RNA (e.g., mRNA) polynucleotide encoding a Malaria (e.g., P. falciparum, P. vivax, P. malariae and/or P. ovale) antigenic polypeptide, a JEV antigenic polypeptide, a DENV antigenic polypeptide and a YFV antigenic polypeptide.

[0495] In some embodiments, a combination RNA (e.g., mRNA) vaccine comprises a RNA (e.g., mRNA) polynucleotide encoding a Malaria (e.g., P. falciparum, P. vivax, P. malariae and/or P. ovale) antigenic polypeptide, a JEV antigenic polypeptide, a ZIKV antigenic polypeptide and a YFV antigenic polypeptide.

[0496] In some embodiments, a combination RNA (e.g., mRNA) vaccine comprises a RNA (e.g., mRNA) polynucleotide encoding a Malaria (e.g., P. falciparum, P. vivax, P. malariae and/or P. ovale) antigenic polypeptide, a WNV antigenic polypeptide, a EEEV antigenic polypeptide and a VEEV antigenic polypeptide.

[0497] In some embodiments, a combination RNA (e.g., mRNA) vaccine comprises a RNA (e.g., mRNA) polynucleotide encoding a Malaria (e.g., P. falciparum, P. vivax, P. malariae and/or P. ovale) antigenic polypeptide, a WNV antigenic polypeptide, a EEEV antigenic polypeptide and a SINV antigenic polypeptide.

[0498] In some embodiments, a combination RNA (e.g., mRNA) vaccine comprises a RNA (e.g., mRNA) polynucleotide encoding a Malaria (e.g., P. falciparum, P. vivax, P. malariae and/or P. ovale) antigenic polypeptide, a WNV antigenic polypeptide, a EEEV antigenic polypeptide and a CHIKV antigenic polypeptide.

[0499] In some embodiments, a combination RNA (e.g., mRNA) vaccine comprises a RNA (e.g., mRNA) polynucleotide encoding a Malaria (e.g., P. falciparum, P. vivax, P. malariae and/or P. ovale) antigenic polypeptide, a WNV antigenic polypeptide, a EEEV antigenic polypeptide and a DENV antigenic polypeptide.

[0500] In some embodiments, a combination RNA (e.g., mRNA) vaccine comprises a RNA (e.g., mRNA) polynucleotide encoding a Malaria (e.g., P. falciparum, P. vivax, P. malariae and/or P. ovale) antigenic polypeptide, a WNV antigenic polypeptide, a EEEV antigenic polypeptide and a ZIKV antigenic polypeptide.

[0501] In some embodiments, a combination RNA (e.g., mRNA) vaccine comprises a RNA (e.g., mRNA) polynucleotide encoding a Malaria (e.g., P. falciparum, P. vivax, P. malariae and/or P. ovale) antigenic polypeptide, a WNV antigenic polypeptide, a EEEV antigenic polypeptide and a YFV antigenic polypeptide.

[0502] In some embodiments, a combination RNA (e.g., mRNA) vaccine comprises a RNA (e.g., mRNA) polynucleotide encoding a Malaria (e.g., P. falciparum, P. vivax, P. malariae and/or P. ovale) antigenic polypeptide, a WNV antigenic polypeptide, a VEEV antigenic polypeptide and a SINV antigenic polypeptide.

[0503] In some embodiments, a combination RNA (e.g., mRNA) vaccine comprises a RNA (e.g., mRNA) polynucleotide encoding a Malaria (e.g., P. falciparum, P. vivax, P. malariae and/or P. ovale) antigenic polypeptide, a WNV antigenic polypeptide, a VEEV antigenic polypeptide and a CHIKV antigenic polypeptide.

[0504] In some embodiments, a combination RNA (e.g., mRNA) vaccine comprises a RNA (e.g., mRNA) polynucleotide encoding a Malaria (e.g., P. falciparum, P. vivax, P. malariae and/or P. ovale) antigenic polypeptide, a WNV antigenic polypeptide, a VEEV antigenic polypeptide and a DENV antigenic polypeptide.

[0505] In some embodiments, a combination RNA (e.g., mRNA) vaccine comprises a RNA (e.g., mRNA) polynucleotide encoding a Malaria (e.g., P. falciparum, P. vivax, P. malariae and/or P. ovale) antigenic polypeptide, a WNV antigenic polypeptide, a VEEV antigenic polypeptide and a ZIKV antigenic polypeptide.

[0506] In some embodiments, a combination RNA (e.g., mRNA) vaccine comprises a RNA (e.g., mRNA) polynucleotide encoding a Malaria (e.g., P. falciparum, P. vivax, P. malariae and/or P. ovale) antigenic polypeptide, a WNV antigenic polypeptide, a VEEV antigenic polypeptide and a YFV antigenic polypeptide.

[0507] In some embodiments, a combination RNA (e.g., mRNA) vaccine comprises a RNA (e.g., mRNA) polynucleotide encoding a Malaria (e.g., P. falciparum, P. vivax, P. malariae and/or P. ovale) antigenic polypeptide, a WNV antigenic polypeptide, a SINV antigenic polypeptide and a CHIKV antigenic polypeptide.

[0508] In some embodiments, a combination RNA (e.g., mRNA) vaccine comprises a RNA (e.g., mRNA) polynucleotide encoding a Malaria (e.g., P. falciparum, P. vivax, P. malariae and/or P. ovale) antigenic polypeptide, a WNV antigenic polypeptide, a SINV antigenic polypeptide and a DENV antigenic polypeptide.

[0509] In some embodiments, a combination RNA (e.g., mRNA) vaccine comprises a RNA (e.g., mRNA) polynucleotide encoding a Malaria (e.g., P. falciparum, P. vivax, P. malariae and/or P. ovale) antigenic polypeptide, a WNV antigenic polypeptide, a SINV antigenic polypeptide and a ZIKV antigenic polypeptide.

[0510] In some embodiments, a combination RNA (e.g., mRNA) vaccine comprises a RNA (e.g., mRNA) polynucleotide encoding a Malaria (e.g., P. falciparum, P. vivax, P. malariae and/or P. ovale) antigenic polypeptide, a WNV antigenic polypeptide, a SINV antigenic polypeptide and YFV antigenic polypeptide.

[0511] In some embodiments, a combination RNA (e.g., mRNA) vaccine comprises a RNA (e.g., mRNA) polynucleotide encoding a Malaria (e.g., P. falciparum, P. vivax, P. malariae and/or P. ovale) antigenic polypeptide, a WNV antigenic polypeptide, a CHIKV antigenic polypeptide and a DENV antigenic polypeptide.

[0512] In some embodiments, a combination RNA (e.g., mRNA) vaccine comprises a RNA (e.g., mRNA) polynucleotide encoding a Malaria (e.g., P. falciparum, P. vivax, P. malariae and/or P. ovale) antigenic polypeptide, a WNV antigenic polypeptide, a CHIKV antigenic polypeptide and a ZIKV antigenic polypeptide.

[0513] In some embodiments, a combination RNA (e.g., mRNA) vaccine comprises a RNA (e.g., mRNA) polynucleotide encoding a Malaria (e.g., P. falciparum, P. vivax, P. malariae and/or P. ovale) antigenic polypeptide, a WNV antigenic polypeptide, a CHIKV antigenic polypeptide and a YFV antigenic polypeptide.

[0514] In some embodiments, a combination RNA (e.g., mRNA) vaccine comprises a RNA (e.g., mRNA) polynucleotide encoding a Malaria (e.g., P. falciparum, P. vivax, P. malariae and/or P. ovale) antigenic polypeptide, a WNV antigenic polypeptide, DENV antigenic polypeptide and a ZIKV antigenic polypeptide.

[0515] In some embodiments, a combination RNA (e.g., mRNA) vaccine comprises a RNA (e.g., mRNA) polynucleotide encoding a Malaria (e.g., P. falciparum, P. vivax, P. malariae and/or P. ovale) antigenic polypeptide, a WNV antigenic polypeptide, DENV antigenic polypeptide and a YFV antigenic polypeptide.

[0516] In some embodiments, a combination RNA (e.g., mRNA) vaccine comprises a RNA (e.g., mRNA) polynucleotide encoding a Malaria (e.g., P. falciparum, P. vivax, P. malariae and/or P. ovale) antigenic polypeptide, a WNV antigenic polypeptide, ZIKV antigenic polypeptide and a YFV antigenic polypeptide.

[0517] In some embodiments, a combination RNA (e.g., mRNA) vaccine comprises a RNA (e.g., mRNA) polynucleotide encoding a Malaria (e.g., P. falciparum, P. vivax, P. malariae and/or P. ovale) antigenic polypeptide, EEEV antigenic polypeptide, a VEEV antigenic polypeptide and a SINV antigenic polypeptide.

[0518] In some embodiments, a combination RNA (e.g., mRNA) vaccine comprises a RNA (e.g., mRNA) polynucleotide encoding a Malaria (e.g., P. falciparum, P. vivax, P. malariae and/or P. ovale) antigenic polypeptide, EEEV antigenic polypeptide, a VEEV antigenic polypeptide and a CHIKV antigenic polypeptide.

[0519] In some embodiments, a combination RNA (e.g., mRNA) vaccine comprises a RNA (e.g., mRNA) polynucleotide encoding a Malaria (e.g., P. falciparum, P. vivax, P. malariae and/or P. ovale) antigenic polypeptide, EEEV antigenic polypeptide, a VEEV antigenic polypeptide and a DENV antigenic polypeptide.

[0520] In some embodiments, a combination RNA (e.g., mRNA) vaccine comprises a RNA (e.g., mRNA) polynucleotide encoding a Malaria (e.g., P. falciparum, P. vivax, P. malariae and/or P. ovale) antigenic polypeptide, EEEV antigenic polypeptide, a VEEV antigenic polypeptide and a ZIKV antigenic polypeptide.

[0521] In some embodiments, a combination RNA (e.g., mRNA) vaccine comprises a RNA (e.g., mRNA) polynucleotide encoding a Malaria (e.g., P. falciparum, P. vivax, P. malariae and/or P. ovale) antigenic polypeptide, EEEV antigenic polypeptide, a VEEV antigenic polypeptide and a YFV antigenic polypeptide.

[0522] In some embodiments, a combination RNA (e.g., mRNA) vaccine comprises a RNA (e.g., mRNA) polynucleotide encoding a Malaria (e.g., P. falciparum, P. vivax, P. malariae and/or P. ovale) antigenic polypeptide, a SINV antigenic polypeptide and a CHIKV antigenic polypeptide.

[0523] In some embodiments, a combination RNA (e.g., mRNA) vaccine comprises a RNA (e.g., mRNA) polynucleotide encoding a Malaria (e.g., P. falciparum, P. vivax, P. malariae and/or P. ovale) antigenic polypeptide, a SINV antigenic polypeptide and a DENV antigenic polypeptide.

[0524] In some embodiments, a combination RNA (e.g., mRNA) vaccine comprises a RNA (e.g., mRNA) polynucleotide encoding a Malaria (e.g., P. falciparum, P. vivax, P. malariae and/or P. ovale) antigenic polypeptide, a SINV antigenic polypeptide and a ZIKV antigenic polypeptide.

[0525] In some embodiments, a combination RNA (e.g., mRNA) vaccine comprises a RNA (e.g., mRNA) polynucleotide encoding a Malaria (e.g., P. falciparum, P. vivax, P. malariae and/or P. ovale) antigenic polypeptide, a SINV antigenic polypeptide and a YFV antigenic polypeptide.

[0526] In some embodiments, a combination RNA (e.g., mRNA) vaccine comprises a RNA (e.g., mRNA) polynucleotide encoding a Malaria (e.g., P. falciparum, P. vivax, P. malariae and/or P. ovale) antigenic polypeptide, a EEEV antigenic polypeptide, a CHIKV antigenic polypeptide and a DENV antigenic polypeptide.

[0527] In some embodiments, a combination RNA (e.g., mRNA) vaccine comprises a RNA (e.g., mRNA) polynucleotide encoding a Malaria (e.g., P. falciparum, P. vivax, P. malariae and/or P. ovale) antigenic polypeptide, a EEEV antigenic polypeptide, a CHIKV antigenic polypeptide and a ZIKV antigenic polypeptide.

[0528] In some embodiments, a combination RNA (e.g., mRNA) vaccine comprises a RNA (e.g., mRNA) polynucleotide encoding a Malaria (e.g., P. falciparum, P. vivax, P. malariae and/or P. ovale) antigenic polypeptide, a EEEV antigenic polypeptide, a CHIKV antigenic polypeptide and a YFV antigenic polypeptide.

[0529] In some embodiments, a combination RNA (e.g., mRNA) vaccine comprises a RNA (e.g., mRNA) polynucleotide encoding a Malaria (e.g., P. falciparum, P. vivax, P. malariae and/or P. ovale) antigenic polypeptide, a EEEV antigenic polypeptide, DENV antigenic polypeptide and a ZIKV antigenic polypeptide.

[0530] In some embodiments, a combination RNA (e.g., mRNA) vaccine comprises a RNA (e.g., mRNA) polynucleotide encoding a Malaria (e.g., P. falciparum, P. vivax, P. malariae and/or P. ovale) antigenic polypeptide, a EEEV antigenic polypeptide, DENV antigenic polypeptide and a YFV antigenic polypeptide.

[0531] In some embodiments, a combination RNA (e.g., mRNA) vaccine comprises a RNA (e.g., mRNA) polynucleotide encoding a Malaria (e.g., P. falciparum, P. vivax, P. malariae and/or P. ovale) antigenic polypeptide, a EEEV antigenic polypeptide, a ZIKV antigenic polypeptide and a YFV antigenic polypeptide.

[0532] In some embodiments, a combination RNA (e.g., mRNA) vaccine comprises a RNA (e.g., mRNA) polynucleotide encoding a Malaria (e.g., P. falciparum, P. vivax, P. malariae and/or P. ovale) antigenic polypeptide, a VEEV antigenic polypeptide, a SINV antigenic polypeptide and a CHIKV antigenic polypeptide.

[0533] In some embodiments, a combination RNA (e.g., mRNA) vaccine comprises a RNA (e.g., mRNA) polynucleotide encoding a Malaria (e.g., P. falciparum, P. vivax, P. malariae and/or P. ovale) antigenic polypeptide, a VEEV antigenic polypeptide, a SINV antigenic polypeptide and a DENV antigenic polypeptide.

[0534] In some embodiments, a combination RNA (e.g., mRNA) vaccine comprises a RNA (e.g., mRNA) polynucleotide encoding a Malaria (e.g., P. falciparum, P. vivax, P. malariae and/or P. ovale) antigenic polypeptide, a VEEV antigenic polypeptide, a SINV antigenic polypeptide and a ZIKV antigenic polypeptide.

[0535] In some embodiments, a combination RNA (e.g., mRNA) vaccine comprises a RNA (e.g., mRNA) polynucleotide encoding a Malaria (e.g., P. falciparum, P. vivax, P. malariae and/or P. ovale) antigenic polypeptide, a VEEV antigenic polypeptide, a SINV antigenic polypeptide and a YFV antigenic polypeptide.

[0536] In some embodiments, a combination RNA (e.g., mRNA) vaccine comprises a RNA (e.g., mRNA) polynucleotide encoding a Malaria (e.g., P. falciparum, P. vivax, P. malariae and/or P. ovale) antigenic polypeptide, a VEEV antigenic polypeptide, a CHIKV antigenic polypeptide and a DENV antigenic polypeptide.

[0537] In some embodiments, a combination RNA (e.g., mRNA) vaccine comprises a RNA (e.g., mRNA) polynucleotide encoding a Malaria (e.g., P. falciparum, P. vivax, P. malariae and/or P. ovale) antigenic polypeptide, a VEEV antigenic polypeptide, a CHIKV antigenic polypeptide and a ZIKV antigenic polypeptide.

[0538] In some embodiments, a combination RNA (e.g., mRNA) vaccine comprises a RNA (e.g., mRNA) polynucleotide encoding a Malaria (e.g., P. falciparum, P. vivax, P. malariae and/or P. ovale) antigenic polypeptide, a VEEV antigenic polypeptide, a CHIKV antigenic polypeptide and a YFV antigenic polypeptide.

[0539] In some embodiments, a combination RNA (e.g., mRNA) vaccine comprises a RNA (e.g., mRNA) polynucleotide encoding a Malaria (e.g., P. falciparum, P. vivax, P. malariae and/or P. ovale) antigenic polypeptide, a VEEV antigenic polypeptide, a DENV antigenic polypeptide and a ZIKV antigenic polypeptide.

[0540] In some embodiments, a combination RNA (e.g., mRNA) vaccine comprises a RNA (e.g., mRNA) polynucleotide encoding a Malaria (e.g., P. falciparum, P. vivax, P. malariae and/or P. ovale) antigenic polypeptide, a VEEV antigenic polypeptide, a DENV antigenic polypeptide and a YFV antigenic polypeptide.

[0541] In some embodiments, a combination RNA (e.g., mRNA) vaccine comprises a RNA (e.g., mRNA) polynucleotide encoding a Malaria (e.g., P. falciparum, P. vivax, P. malariae and/or P. ovale) antigenic polypeptide, a VEEV antigenic polypeptide, a ZIKV antigenic polypeptide and a YFV antigenic polypeptide.

[0542] In some embodiments, a combination RNA (e.g., mRNA) vaccine comprises a RNA (e.g., mRNA) polynucleotide encoding a Malaria (e.g., P. falciparum, P. vivax, P. malariae and/or P. ovale) antigenic polypeptide, a SINV antigenic polypeptide, a CHIKV antigenic polypeptide and a DENV antigenic polypeptide.

[0543] In some embodiments, a combination RNA (e.g., mRNA) vaccine comprises a RNA (e.g., mRNA) polynucleotide encoding a Malaria (e.g., P. falciparum, P. vivax, P. malariae and/or P. ovale) antigenic polypeptide, a SINV antigenic polypeptide, a CHIKV antigenic polypeptide and a ZIKV antigenic polypeptide.

[0544] In some embodiments, a combination RNA (e.g., mRNA) vaccine comprises a RNA (e.g., mRNA) polynucleotide encoding a Malaria (e.g., P. falciparum, P. vivax, P. malariae and/or P. ovale) antigenic polypeptide, a SINV antigenic polypeptide, a CHIKV antigenic polypeptide and a YFV antigenic polypeptide.

[0545] In some embodiments, a combination RNA (e.g., mRNA) vaccine comprises a RNA (e.g., mRNA) polynucleotide encoding a Malaria (e.g., P. falciparum, P. vivax, P. malariae and/or P. ovale) antigenic polypeptide, a SINV antigenic polypeptide, a DENV antigenic polypeptide and a ZIKV antigenic polypeptide.

[0546] In some embodiments, a combination RNA (e.g., mRNA) vaccine comprises a RNA (e.g., mRNA) polynucleotide encoding a Malaria (e.g., P. falciparum, P. vivax, P. malariae and/or P. ovale) antigenic polypeptide, a SINV antigenic polypeptide, a DENV antigenic polypeptide and a YFV antigenic polypeptide.

[0547] In some embodiments, a combination RNA (e.g., mRNA) vaccine comprises a RNA (e.g., mRNA) polynucleotide encoding a Malaria (e.g., P. falciparum, P. vivax, P. malariae and/or P. ovale) antigenic polypeptide, a SINV antigenic polypeptide, a ZIKV antigenic polypeptide and a YFV antigenic polypeptide.

[0548] In some embodiments, a combination RNA (e.g., mRNA) vaccine comprises a RNA (e.g., mRNA) polynucleotide encoding a Malaria (e.g., P. falciparum, P. vivax, P. malariae and/or P. ovale) antigenic polypeptide, a CHIKV antigenic polypeptide, a DENV antigenic polypeptide and a ZIKV antigenic polypeptide.

[0549] In some embodiments, a combination RNA (e.g., mRNA) vaccine comprises a RNA (e.g., mRNA) polynucleotide encoding a Malaria (e.g., P. falciparum, P. vivax, P. malariae and/or P. ovale) antigenic polypeptide, a CHIKV antigenic polypeptide, a DENV antigenic polypeptide and a YFV antigenic polypeptide.

[0550] In some embodiments, a combination RNA (e.g., mRNA) vaccine comprises a RNA (e.g., mRNA) polynucleotide encoding a Malaria (e.g., P. falciparum, P. vivax, P. malariae and/or P. ovale) antigenic polypeptide, a CHIKV antigenic polypeptide, a ZIKV antigenic polypeptide and a YFV antigenic polypeptide.

[0551] In some embodiments, a combination RNA (e.g., mRNA) vaccine comprises a RNA (e.g., mRNA) polynucleotide encoding a Malaria (e.g., P. falciparum, P. vivax, P. malariae and/or P. ovale) antigenic polypeptide, a DENV antigenic polypeptide, a ZIKV antigenic polypeptide and a YFV antigenic polypeptide.

[0552] In some embodiments, a combination RNA (e.g., mRNA) vaccine comprises a RNA (e.g., mRNA) polynucleotide encoding a JEV antigenic polypeptide, a WNV antigenic polypeptide, a EEEV antigenic polypeptide and a VEEV antigenic.

[0553] In some embodiments, a combination RNA (e.g., mRNA) vaccine comprises a RNA (e.g., mRNA) polynucleotide encoding a JEV antigenic polypeptide, a WNV antigenic polypeptide, a EEEV antigenic polypeptide and a SINV antigenic polypeptide.

[0554] In some embodiments, a combination RNA (e.g., mRNA) vaccine comprises a RNA (e.g., mRNA) polynucleotide encoding a JEV antigenic polypeptide, a WNV antigenic polypeptide, a EEEV antigenic polypeptide and a CHIKV antigenic polypeptide.

[0555] In some embodiments, a combination RNA (e.g., mRNA) vaccine comprises a RNA (e.g., mRNA) polynucleotide encoding a JEV antigenic polypeptide, a WNV antigenic polypeptide, a EEEV antigenic polypeptide and a DENV antigenic polypeptide.

[0556] In some embodiments, a combination RNA (e.g., mRNA) vaccine comprises a RNA (e.g., mRNA) polynucleotide encoding a JEV antigenic polypeptide, a WNV antigenic polypeptide, a EEEV antigenic polypeptide and a ZIKV antigenic polypeptide.

[0557] In some embodiments, a combination RNA (e.g., mRNA) vaccine comprises a RNA (e.g., mRNA) polynucleotide encoding a JEV antigenic polypeptide, a WNV antigenic polypeptide, a EEEV antigenic polypeptide and a YFV antigenic polypeptide.

[0558] In some embodiments, a combination RNA (e.g., mRNA) vaccine comprises a RNA (e.g., mRNA) polynucleotide encoding a JEV antigenic polypeptide, a WNV antigenic polypeptide, a VEEV antigenic polypeptide and a SINV antigenic polypeptide.

[0559] In some embodiments, a combination RNA (e.g., mRNA) vaccine comprises a RNA (e.g., mRNA) polynucleotide encoding a JEV antigenic polypeptide, a WNV antigenic polypeptide, a VEEV antigenic polypeptide and a CHIKV antigenic polypeptide.

[0560] In some embodiments, a combination RNA (e.g., mRNA) vaccine comprises a RNA (e.g., mRNA) polynucleotide encoding a JEV antigenic polypeptide, a WNV antigenic polypeptide, a VEEV antigenic polypeptide and a DENV antigenic polypeptide.

[0561] In some embodiments, a combination RNA (e.g., mRNA) vaccine comprises a RNA (e.g., mRNA) polynucleotide encoding a JEV antigenic polypeptide, a WNV antigenic polypeptide, a VEEV antigenic polypeptide and a ZIKV antigenic polypeptide.

[0562] In some embodiments, a combination RNA (e.g., mRNA) vaccine comprises a RNA (e.g., mRNA) polynucleotide encoding a JEV antigenic polypeptide, a WNV antigenic polypeptide, a VEEV antigenic polypeptide and a YFV antigenic polypeptide.

[0563] In some embodiments, a combination RNA (e.g., mRNA) vaccine comprises a RNA (e.g., mRNA) polynucleotide encoding a JEV antigenic polypeptide, a WNV antigenic polypeptide, a VEEV antigenic polypeptide and a SINV antigenic polypeptide.

[0564] In some embodiments, a combination RNA (e.g., mRNA) vaccine comprises a RNA (e.g., mRNA) polynucleotide encoding a JEV antigenic polypeptide, a WNV antigenic polypeptide, a VEEV antigenic polypeptide and a CHIKV antigenic polypeptide.

[0565] In some embodiments, a combination RNA (e.g., mRNA) vaccine comprises a RNA (e.g., mRNA) polynucleotide encoding a JEV antigenic polypeptide, a WNV antigenic polypeptide, a VEEV antigenic polypeptide and a DENV antigenic polypeptide.

[0566] In some embodiments, a combination RNA (e.g., mRNA) vaccine comprises a RNA (e.g., mRNA) polynucleotide encoding a JEV antigenic polypeptide, a WNV antigenic polypeptide, a VEEV antigenic polypeptide and a ZIKV antigenic polypeptide and a YFV antigenic polypeptide.

[0567] In some embodiments, a combination RNA (e.g., mRNA) vaccine comprises a RNA (e.g., mRNA) polynucleotide encoding a JEV antigenic polypeptide, a WNV antigenic polypeptide, a VEEV antigenic polypeptide and a YFV antigenic polypeptide.

[0568] In some embodiments, a combination RNA (e.g., mRNA) vaccine comprises a RNA (e.g., mRNA) polynucleotide encoding a JEV antigenic polypeptide, a WNV antigenic polypeptide, a SINV antigenic polypeptide and a CHIKV antigenic polypeptide.

[0569] In some embodiments, a combination RNA (e.g., mRNA) vaccine comprises a RNA (e.g., mRNA) polynucleotide encoding a JEV antigenic polypeptide, a WNV antigenic polypeptide, a SINV antigenic polypeptide and a DENV antigenic polypeptide.

[0570] In some embodiments, a combination RNA (e.g., mRNA) vaccine comprises a RNA (e.g., mRNA) polynucleotide encoding a JEV antigenic polypeptide, a WNV antigenic polypeptide, a SINV antigenic polypeptide and a ZIKV antigenic polypeptide.

[0571] In some embodiments, a combination RNA (e.g., mRNA) vaccine comprises a RNA (e.g., mRNA) polynucleotide encoding a JEV antigenic polypeptide, a WNV antigenic polypeptide, a SINV antigenic polypeptide and a YFV antigenic polypeptide.

[0572] In some embodiments, a combination RNA (e.g., mRNA) vaccine comprises a RNA (e.g., mRNA) polynucleotide encoding a JEV antigenic polypeptide, a WNV antigenic polypeptide, a CHIKV antigenic polypeptide and a DENV antigenic polypeptide.

[0573] In some embodiments, a combination RNA (e.g., mRNA) vaccine comprises a RNA (e.g., mRNA) polynucleotide encoding a JEV antigenic polypeptide, a WNV antigenic polypeptide, a CHIKV antigenic polypeptide and a ZIKV antigenic polypeptide

[0574] In some embodiments, a combination RNA (e.g., mRNA) vaccine comprises a RNA (e.g., mRNA) polynucleotide encoding a JEV antigenic polypeptide, a WNV antigenic polypeptide, a CHIKV antigenic polypeptide and a YFV antigenic polypeptide.

[0575] In some embodiments, a combination RNA (e.g., mRNA) vaccine comprises a RNA (e.g., mRNA) polynucleotide encoding a JEV antigenic polypeptide, a WNV antigenic polypeptide, a DENV antigenic polypeptide and a ZIKV antigenic polypeptide.

[0576] In some embodiments, a combination RNA (e.g., mRNA) vaccine comprises a RNA (e.g., mRNA) polynucleotide encoding a JEV antigenic polypeptide, a WNV antigenic polypeptide, a DENV antigenic polypeptide and a YFV antigenic polypeptide.

[0577] In some embodiments, a combination RNA (e.g., mRNA) vaccine comprises a RNA (e.g., mRNA) polynucleotide encoding a JEV antigenic polypeptide, a WNV antigenic polypeptide, a ZIKV antigenic polypeptide and a ZIKV antigenic polypeptide.

[0578] In some embodiments, a combination RNA (e.g., mRNA) vaccine comprises a RNA (e.g., mRNA) polynucleotide encoding a JEV antigenic polypeptide, a EEEV antigenic polypeptide, a VEEV antigenic polypeptide and a SINV antigenic polypeptide.

[0579] In some embodiments, a combination RNA (e.g., mRNA) vaccine comprises a RNA (e.g., mRNA) polynucleotide encoding a JEV antigenic polypeptide, a EEEV antigenic polypeptide, a VEEV antigenic polypeptide and a CHIKV antigenic polypeptide.

[0580] In some embodiments, a combination RNA (e.g., mRNA) vaccine comprises a RNA (e.g., mRNA) polynucleotide encoding a JEV antigenic polypeptide, a EEEV antigenic polypeptide, a VEEV antigenic polypeptide and a DENV antigenic polypeptide.

[0581] In some embodiments, a combination RNA (e.g., mRNA) vaccine comprises a RNA (e.g., mRNA) polynucleotide encoding a JEV antigenic polypeptide, a EEEV antigenic polypeptide, a VEEV antigenic polypeptide and a ZIKV antigenic polypeptide.

[0582] In some embodiments, a combination RNA (e.g., mRNA) vaccine comprises a RNA (e.g., mRNA) polynucleotide encoding a JEV antigenic polypeptide, a EEEV antigenic polypeptide, a VEEV antigenic polypeptide and a YFV antigenic polypeptide.

[0583] In some embodiments, a combination RNA (e.g., mRNA) vaccine comprises a RNA (e.g., mRNA) polynucleotide encoding a JEV antigenic polypeptide, a EEEV antigenic polypeptide, a SINV antigenic polypeptide and a CHIKV antigenic polypeptide.

[0584] In some embodiments, a combination RNA (e.g., mRNA) vaccine comprises a RNA (e.g., mRNA) polynucleotide encoding a JEV antigenic polypeptide, a EEEV antigenic polypeptide, a SINV antigenic polypeptide and a DENV antigenic polypeptide.

[0585] In some embodiments, a combination RNA (e.g., mRNA) vaccine comprises a RNA (e.g., mRNA) polynucleotide encoding a JEV antigenic polypeptide, a EEEV antigenic polypeptide, a SINV antigenic polypeptide and a ZIKV antigenic polypeptide.

[0586] In some embodiments, a combination RNA (e.g., mRNA) vaccine comprises a RNA (e.g., mRNA) polynucleotide encoding a JEV antigenic polypeptide, a EEEV antigenic polypeptide, a SINV antigenic polypeptide and a YFV antigenic polypeptide.

[0587] In some embodiments, a combination RNA (e.g., mRNA) vaccine comprises a RNA (e.g., mRNA) polynucleotide encoding a JEV antigenic polypeptide, a EEEV antigenic polypeptide, a CHIKV antigenic polypeptide and a DENV antigenic polypeptide.

[0588] In some embodiments, a combination RNA (e.g., mRNA) vaccine comprises a RNA (e.g., mRNA) polynucleotide encoding a JEV antigenic polypeptide, a EEEV antigenic polypeptide, a CHIKV antigenic polypeptide and a ZIKV antigenic polypeptide.

[0589] In some embodiments, a combination RNA (e.g., mRNA) vaccine comprises a RNA (e.g., mRNA) polynucleotide encoding a JEV antigenic polypeptide, a EEEV antigenic polypeptide, a CHIKV antigenic polypeptide and a YFV antigenic polypeptide.

[0590] In some embodiments, a combination RNA (e.g., mRNA) vaccine comprises a RNA (e.g., mRNA) polynucleotide encoding a JEV antigenic polypeptide, a EEEV antigenic polypeptide, a DENV antigenic polypeptide and a ZIKV antigenic polypeptide.

[0591] In some embodiments, a combination RNA (e.g., mRNA) vaccine comprises a RNA (e.g., mRNA) polynucleotide encoding a JEV antigenic polypeptide, a EEEV antigenic polypeptide, a DENV antigenic polypeptide and a YFV antigenic polypeptide.

[0592] In some embodiments, a combination RNA (e.g., mRNA) vaccine comprises a RNA (e.g., mRNA) polynucleotide encoding a JEV antigenic polypeptide, a EEEV antigenic polypeptide, a ZIKV antigenic polypeptide and a YFV antigenic polypeptide.

[0593] In some embodiments, a combination RNA (e.g., mRNA) vaccine comprises a RNA (e.g., mRNA) polynucleotide encoding a JEV antigenic polypeptide, a VEEV antigenic polypeptide, a SINV antigenic polypeptide and a CHIKV antigenic polypeptide.

[0594] In some embodiments, a combination RNA (e.g., mRNA) vaccine comprises a RNA (e.g., mRNA) polynucleotide encoding a JEV antigenic polypeptide, a VEEV antigenic polypeptide, a SINV antigenic polypeptide and a DENV antigenic polypeptide.

[0595] In some embodiments, a combination RNA (e.g., mRNA) vaccine comprises a RNA (e.g., mRNA) polynucleotide encoding a JEV antigenic polypeptide, a VEEV antigenic polypeptide, a SINV antigenic polypeptide and a ZIKV antigenic polypeptide.

[0596] In some embodiments, a combination RNA (e.g., mRNA) vaccine comprises a RNA (e.g., mRNA) polynucleotide encoding a JEV antigenic polypeptide, a VEEV antigenic polypeptide, a SINV antigenic polypeptide and a YFV antigenic polypeptide.

[0597] In some embodiments, a combination RNA (e.g., mRNA) vaccine comprises a RNA (e.g., mRNA) polynucleotide encoding a JEV antigenic polypeptide, a VEEV antigenic polypeptide, a CHIKV antigenic polypeptide and a DENV antigenic polypeptide.

[0598] In some embodiments, a combination RNA (e.g., mRNA) vaccine comprises a RNA (e.g., mRNA) polynucleotide encoding a JEV antigenic polypeptide, a VEEV antigenic polypeptide, a CHIKV antigenic polypeptide and a ZIKV antigenic polypeptide.

[0599] In some embodiments, a combination RNA (e.g., mRNA) vaccine comprises a RNA (e.g., mRNA) polynucleotide encoding a JEV antigenic polypeptide, a VEEV antigenic polypeptide, a CHIKV antigenic polypeptide and a YFV antigenic polypeptide.

[0600] In some embodiments, a combination RNA (e.g., mRNA) vaccine comprises a RNA (e.g., mRNA) polynucleotide encoding a JEV antigenic polypeptide, a VEEV antigenic polypeptide, a DENV antigenic polypeptide and a ZIKV antigenic polypeptide.

[0601] In some embodiments, a combination RNA (e.g., mRNA) vaccine comprises a RNA (e.g., mRNA) polynucleotide encoding a JEV antigenic polypeptide, a VEEV antigenic polypeptide, a DENV antigenic polypeptide and a YFV antigenic polypeptide.

[0602] In some embodiments, a combination RNA (e.g., mRNA) vaccine comprises a RNA (e.g., mRNA) polynucleotide encoding a JEV antigenic polypeptide, a VEEV antigenic polypeptide, a ZIKV antigenic polypeptide and a YFV antigenic polypeptide.

[0603] In some embodiments, a combination RNA (e.g., mRNA) vaccine comprises a RNA (e.g., mRNA) polynucleotide encoding a JEV antigenic polypeptide, a SINV antigenic polypeptide, a CHIKV antigenic polypeptide and a DENV antigenic polypeptide.

[0604] In some embodiments, a combination RNA (e.g., mRNA) vaccine comprises a RNA (e.g., mRNA) polynucleotide encoding a JEV antigenic polypeptide, a SINV antigenic polypeptide, a CHIKV antigenic polypeptide and a ZIKV antigenic polypeptide.

[0605] In some embodiments, a combination RNA (e.g., mRNA) vaccine comprises a RNA (e.g., mRNA) polynucleotide encoding a JEV antigenic polypeptide, a SINV antigenic polypeptide, a CHIKV antigenic polypeptide and a YFV antigenic polypeptide.

[0606] In some embodiments, a combination RNA (e.g., mRNA) vaccine comprises a RNA (e.g., mRNA) polynucleotide encoding a JEV antigenic polypeptide, a SINV antigenic polypeptide, a DENV antigenic polypeptide and a ZIKV antigenic polypeptide.

[0607] In some embodiments, a combination RNA (e.g., mRNA) vaccine comprises a RNA (e.g., mRNA) polynucleotide encoding a JEV antigenic polypeptide, a SINV antigenic polypeptide, a DENV antigenic polypeptide and a YFV antigenic polypeptide.

[0608] In some embodiments, a combination RNA (e.g., mRNA) vaccine comprises a RNA (e.g., mRNA) polynucleotide encoding a JEV antigenic polypeptide, a SINV antigenic polypeptide, a ZIKV antigenic polypeptide and a YFV antigenic polypeptide.

[0609] In some embodiments, a combination RNA (e.g., mRNA) vaccine comprises a RNA (e.g., mRNA) polynucleotide encoding a JEV antigenic polypeptide, a CHIKV antigenic polypeptide, a DENV antigenic polypeptide and a ZIKV antigenic polypeptide.

[0610] In some embodiments, a combination RNA (e.g., mRNA) vaccine comprises a RNA (e.g., mRNA) polynucleotide encoding a JEV antigenic polypeptide, a CHIKV antigenic polypeptide, a DENV antigenic polypeptide and a YFV antigenic polypeptide.

[0611] In some embodiments, a combination RNA (e.g., mRNA) vaccine comprises a RNA (e.g., mRNA) polynucleotide encoding a JEV antigenic polypeptide, a CHIKV antigenic polypeptide, a ZIKV antigenic polypeptide and a YFV antigenic polypeptide.

[0612] In some embodiments, a combination RNA (e.g., mRNA) vaccine comprises a RNA (e.g., mRNA) polynucleotide encoding a JEV antigenic polypeptide, a DENV antigenic polypeptide, a ZIKV antigenic polypeptide and a YFV antigenic polypeptide.

[0613] In some embodiments, a combination RNA (e.g., mRNA) vaccine comprises a RNA (e.g., mRNA) polynucleotide encoding a WNV antigenic polypeptide, a EEEV antigenic polypeptide, a VEEV antigenic polypeptide and a SINV antigenic polypeptide.

[0614] In some embodiments, a combination RNA (e.g., mRNA) vaccine comprises a RNA (e.g., mRNA) polynucleotide encoding a WNV antigenic polypeptide, a EEEV antigenic polypeptide, a VEEV antigenic polypeptide and a CHIKV antigenic polypeptide.

[0615] In some embodiments, a combination RNA (e.g., mRNA) vaccine comprises a RNA (e.g., mRNA) polynucleotide encoding a WNV antigenic polypeptide, a EEEV antigenic polypeptide, a VEEV antigenic polypeptide and a DENV antigenic polypeptide.

[0616] In some embodiments, a combination RNA (e.g., mRNA) vaccine comprises a RNA (e.g., mRNA) polynucleotide encoding a WNV antigenic polypeptide, a EEEV antigenic polypeptide, a VEEV antigenic polypeptide and a ZIKV antigenic polypeptide.

[0617] In some embodiments, a combination RNA (e.g., mRNA) vaccine comprises a RNA (e.g., mRNA) polynucleotide encoding a WNV antigenic polypeptide, a EEEV antigenic polypeptide, a VEEV antigenic polypeptide and a YFV antigenic polypeptide.

[0618] In some embodiments, a combination RNA (e.g., mRNA) vaccine comprises a RNA (e.g., mRNA) polynucleotide encoding a WNV antigenic polypeptide, a EEEV antigenic polypeptide, a SINV antigenic polypeptide and a CHIKV antigenic polypeptide.

[0619] In some embodiments, a combination RNA (e.g., mRNA) vaccine comprises a RNA (e.g., mRNA) polynucleotide encoding a WNV antigenic polypeptide, a EEEV antigenic polypeptide, a SINV antigenic polypeptide and a DENV antigenic polypeptide.

[0620] In some embodiments, a combination RNA (e.g., mRNA) vaccine comprises a RNA (e.g., mRNA) polynucleotide encoding a WNV antigenic polypeptide, a EEEV antigenic polypeptide, a SINV antigenic polypeptide and a ZIKV antigenic polypeptide.

[0621] In some embodiments, a combination RNA (e.g., mRNA) vaccine comprises a RNA (e.g., mRNA) polynucleotide encoding a WNV antigenic polypeptide, a EEEV antigenic polypeptide, a SINV antigenic polypeptide and a YFV antigenic polypeptide.

[0622] In some embodiments, a combination RNA (e.g., mRNA) vaccine comprises a RNA (e.g., mRNA) polynucleotide encoding a WNV antigenic polypeptide, a EEEV antigenic polypeptide, a CHIKV antigenic polypeptide and a DENV antigenic polypeptide.

[0623] In some embodiments, a combination RNA (e.g., mRNA) vaccine comprises a RNA (e.g., mRNA) polynucleotide encoding a WNV antigenic polypeptide, a EEEV antigenic polypeptide, a CHIKV antigenic polypeptide and a ZIKV antigenic polypeptide.

[0624] In some embodiments, a combination RNA (e.g., mRNA) vaccine comprises a RNA (e.g., mRNA) polynucleotide encoding a WNV antigenic polypeptide, a EEEV antigenic polypeptide, a CHIKV antigenic polypeptide and a YFV antigenic polypeptide.

[0625] In some embodiments, a combination RNA (e.g., mRNA) vaccine comprises a RNA (e.g., mRNA) polynucleotide encoding a WNV antigenic polypeptide, a EEEV antigenic polypeptide, a DENV antigenic polypeptide and a ZIKV antigenic polypeptide.

[0626] In some embodiments, a combination RNA (e.g., mRNA) vaccine comprises a RNA (e.g., mRNA) polynucleotide encoding a WNV antigenic polypeptide, a EEEV antigenic polypeptide, a DENV antigenic polypeptide and a YFV antigenic polypeptide.

[0627] In some embodiments, a combination RNA (e.g., mRNA) vaccine comprises a RNA (e.g., mRNA) polynucleotide encoding a WNV antigenic polypeptide, a EEEV antigenic polypeptide, a ZIKV antigenic polypeptide and a YFV antigenic polypeptide.

[0628] In some embodiments, a combination RNA (e.g., mRNA) vaccine comprises a RNA (e.g., mRNA) polynucleotide encoding a WNV antigenic polypeptide, a VEEV antigenic polypeptide, a SINV antigenic polypeptide and a CHIKV antigenic polypeptide.

[0629] In some embodiments, a combination RNA (e.g., mRNA) vaccine comprises a RNA (e.g., mRNA) polynucleotide encoding a WNV antigenic polypeptide, a VEEV antigenic polypeptide, a SINV antigenic polypeptide and a DENV antigenic polypeptide.

[0630] In some embodiments, a combination RNA (e.g., mRNA) vaccine comprises a RNA (e.g., mRNA) polynucleotide encoding a WNV antigenic polypeptide, a VEEV antigenic polypeptide, a SINV antigenic polypeptide and a ZIKV antigenic polypeptide.

[0631] In some embodiments, a combination RNA (e.g., mRNA) vaccine comprises a RNA (e.g., mRNA) polynucleotide encoding a WNV antigenic polypeptide, a VEEV antigenic polypeptide, a SINV antigenic polypeptide and a YFV antigenic polypeptide.

[0632] In some embodiments, a combination RNA (e.g., mRNA) vaccine comprises a RNA (e.g., mRNA) polynucleotide encoding a WNV antigenic polypeptide, a VEEV antigenic polypeptide, a CHIKV antigenic polypeptide and a DENV antigenic polypeptide.

[0633] In some embodiments, a combination RNA (e.g., mRNA) vaccine comprises a RNA (e.g., mRNA) polynucleotide encoding a WNV antigenic polypeptide, a VEEV antigenic polypeptide, a CHIKV antigenic polypeptide and a ZIKV antigenic polypeptide.

[0634] In some embodiments, a combination RNA (e.g., mRNA) vaccine comprises a RNA (e.g., mRNA) polynucleotide encoding a WNV antigenic polypeptide, a VEEV antigenic polypeptide, a CHIKV antigenic polypeptide and a YFV antigenic polypeptide.

[0635] In some embodiments, a combination RNA (e.g., mRNA) vaccine comprises a RNA (e.g., mRNA) polynucleotide encoding a WNV antigenic polypeptide, a VEEV antigenic polypeptide, a DENV antigenic polypeptide and a ZIKV antigenic polypeptide.

[0636] In some embodiments, a combination RNA (e.g., mRNA) vaccine comprises a RNA (e.g., mRNA) polynucleotide encoding a WNV antigenic polypeptide, a VEEV antigenic polypeptide, a DENV antigenic polypeptide and a YFV antigenic polypeptide.

[0637] In some embodiments, a combination RNA (e.g., mRNA) vaccine comprises a RNA (e.g., mRNA) polynucleotide encoding a WNV antigenic polypeptide, a VEEV antigenic polypeptide, a ZIKV antigenic polypeptide and a YFV antigenic polypeptide.

[0638] In some embodiments, a combination RNA (e.g., mRNA) vaccine comprises a RNA (e.g., mRNA) polynucleotide encoding a WNV antigenic polypeptide, a SINV antigenic polypeptide, a CHIKV antigenic polypeptide and a DENV antigenic polypeptide.

[0639] In some embodiments, a combination RNA (e.g., mRNA) vaccine comprises a RNA (e.g., mRNA) polynucleotide encoding a WNV antigenic polypeptide, a SINV antigenic polypeptide, a CHIKV antigenic polypeptide and a ZIKV antigenic polypeptide.

[0640] In some embodiments, a combination RNA (e.g., mRNA) vaccine comprises a RNA (e.g., mRNA) polynucleotide encoding a WNV antigenic polypeptide, a SINV antigenic polypeptide, a CHIKV antigenic polypeptide and a YFV antigenic polypeptide.

[0641] In some embodiments, a combination RNA (e.g., mRNA) vaccine comprises a RNA (e.g., mRNA) polynucleotide encoding a WNV antigenic polypeptide, a SINV antigenic polypeptide, a DENV antigenic polypeptide and a ZIKV antigenic polypeptide.

[0642] In some embodiments, a combination RNA (e.g., mRNA) vaccine comprises a RNA (e.g., mRNA) polynucleotide encoding a WNV antigenic polypeptide, a SINV antigenic polypeptide, a DENV antigenic polypeptide and a YFV antigenic polypeptide.

[0643] In some embodiments, a combination RNA (e.g., mRNA) vaccine comprises a RNA (e.g., mRNA) polynucleotide encoding a WNV antigenic polypeptide, a SINV antigenic polypeptide, a ZIKV antigenic polypeptide and a YFV antigenic polypeptide.

[0644] In some embodiments, a combination RNA (e.g., mRNA) vaccine comprises a RNA (e.g., mRNA) polynucleotide encoding a WNV antigenic polypeptide, a CHIKV antigenic polypeptide, a DENV antigenic polypeptide and a ZIKV antigenic polypeptide.

[0645] In some embodiments, a combination RNA (e.g., mRNA) vaccine comprises a RNA (e.g., mRNA) polynucleotide encoding a WNV antigenic polypeptide, a CHIKV antigenic polypeptide, a DENV antigenic polypeptide and a YFV antigenic polypeptide.

[0646] In some embodiments, a combination RNA (e.g., mRNA) vaccine comprises a RNA (e.g., mRNA) polynucleotide encoding a WNV antigenic polypeptide, a CHIKV antigenic polypeptide, a ZIKV antigenic polypeptide and a YFV antigenic polypeptide.

[0647] In some embodiments, a combination RNA (e.g., mRNA) vaccine comprises a RNA (e.g., mRNA) polynucleotide encoding a WNV antigenic polypeptide, a DENV antigenic polypeptide, a ZIKV antigenic polypeptide and a YFV antigenic polypeptide.

[0648] In some embodiments, a combination RNA (e.g., mRNA) vaccine comprises a RNA (e.g., mRNA) polynucleotide encoding a EEEV antigenic polypeptide, a VEEV antigenic polypeptide, a SINV antigenic polypeptide and a CHIKV antigenic polypeptide.

[0649] In some embodiments, a combination RNA (e.g., mRNA) vaccine comprises a RNA (e.g., mRNA) polynucleotide encoding a EEEV antigenic polypeptide, a VEEV antigenic polypeptide, a SINV antigenic polypeptide and a DENV antigenic polypeptide.

[0650] In some embodiments, a combination RNA (e.g., mRNA) vaccine comprises a RNA (e.g., mRNA) polynucleotide encoding a EEEV antigenic polypeptide, a VEEV antigenic polypeptide, a SINV antigenic polypeptide and a ZIKV antigenic polypeptide.

[0651] In some embodiments, a combination RNA (e.g., mRNA) vaccine comprises a RNA (e.g., mRNA) polynucleotide encoding a EEEV antigenic polypeptide, a VEEV antigenic polypeptide, a SINV antigenic polypeptide and a YFV antigenic polypeptide.

[0652] In some embodiments, a combination RNA (e.g., mRNA) vaccine comprises a RNA (e.g., mRNA) polynucleotide encoding a EEEV antigenic polypeptide, a VEEV antigenic polypeptide, a CHIKV antigenic polypeptide and a DENV antigenic polypeptide.

[0653] In some embodiments, a combination RNA (e.g., mRNA) vaccine comprises a RNA (e.g., mRNA) polynucleotide encoding a EEEV antigenic polypeptide, a VEEV antigenic polypeptide, a CHIKV antigenic polypeptide and a ZIKV antigenic polypeptide.

[0654] In some embodiments, a combination RNA (e.g., mRNA) vaccine comprises a RNA (e.g., mRNA) polynucleotide encoding a EEEV antigenic polypeptide, a VEEV antigenic polypeptide, a CHIKV antigenic polypeptide and a YFV antigenic polypeptide.

[0655] In some embodiments, a combination RNA (e.g., mRNA) vaccine comprises a RNA (e.g., mRNA) polynucleotide encoding a EEEV antigenic polypeptide, a VEEV antigenic polypeptide, a DENV antigenic polypeptide and a ZIKV antigenic polypeptide.

[0656] In some embodiments, a combination RNA (e.g., mRNA) vaccine comprises a RNA (e.g., mRNA) polynucleotide encoding a EEEV antigenic polypeptide, a VEEV antigenic polypeptide, a DENV antigenic polypeptide and a YFV antigenic polypeptide.

[0657] In some embodiments, a combination RNA (e.g., mRNA) vaccine comprises a RNA (e.g., mRNA) polynucleotide encoding a EEEV antigenic polypeptide, a VEEV antigenic polypeptide, a ZIKV antigenic polypeptide and a YFV antigenic polypeptide.

[0658] In some embodiments, a combination RNA (e.g., mRNA) vaccine comprises a RNA (e.g., mRNA) polynucleotide encoding a EEEV antigenic polypeptide, a SINV antigenic polypeptide, a CHIKV antigenic polypeptide and a DENV antigenic polypeptide.

[0659] In some embodiments, a combination RNA (e.g., mRNA) vaccine comprises a RNA (e.g., mRNA) polynucleotide encoding a EEEV antigenic polypeptide, a SINV antigenic polypeptide, a CHIKV antigenic polypeptide and a ZIKV antigenic polypeptide.

[0660] In some embodiments, a combination RNA (e.g., mRNA) vaccine comprises a RNA (e.g., mRNA) polynucleotide encoding a EEEV antigenic polypeptide, a SINV antigenic polypeptide, a CHIKV antigenic polypeptide and a YFV antigenic polypeptide.

[0661] In some embodiments, a combination RNA (e.g., mRNA) vaccine comprises a RNA (e.g., mRNA) polynucleotide encoding a EEEV antigenic polypeptide, a SINV antigenic polypeptide, a DENV antigenic polypeptide and a ZIKV antigenic polypeptide.

[0662] In some embodiments, a combination RNA (e.g., mRNA) vaccine comprises a RNA (e.g., mRNA) polynucleotide encoding a EEEV antigenic polypeptide, a SINV antigenic polypeptide, a DENV antigenic polypeptide and a YFV antigenic polypeptide.

[0663] In some embodiments, a combination RNA (e.g., mRNA) vaccine comprises a RNA (e.g., mRNA) polynucleotide encoding a EEEV antigenic polypeptide, a SINV antigenic polypeptide, a ZIKV antigenic polypeptide and a YFV antigenic polypeptide.

[0664] In some embodiments, a combination RNA (e.g., mRNA) vaccine comprises a RNA (e.g., mRNA) polynucleotide encoding a EEEV antigenic polypeptide, a SINV antigenic polypeptide, a DENV antigenic polypeptide and a ZIKV antigenic polypeptide.

[0665] In some embodiments, a combination RNA (e.g., mRNA) vaccine comprises a RNA (e.g., mRNA) polynucleotide encoding a EEEV antigenic polypeptide, a SINV antigenic polypeptide, a DENV antigenic polypeptide and a YFV antigenic polypeptide.

[0666] In some embodiments, a combination RNA (e.g., mRNA) vaccine comprises a RNA (e.g., mRNA) polynucleotide encoding a EEEV antigenic polypeptide, a SINV antigenic polypeptide, a ZIKV antigenic polypeptide and a YFV antigenic polypeptide.

[0667] In some embodiments, a combination RNA (e.g., mRNA) vaccine comprises a RNA (e.g., mRNA) polynucleotide encoding VEEV antigenic polypeptide, a SINV antigenic polypeptide, a CHIKV antigenic polypeptide and a DENV antigenic polypeptide

[0668] In some embodiments, a combination RNA (e.g., mRNA) vaccine comprises a RNA (e.g., mRNA) polynucleotide encoding VEEV antigenic polypeptide, a SINV antigenic polypeptide, a CHIKV antigenic polypeptide and a ZIKV antigenic polypeptide.

[0669] In some embodiments, a combination RNA (e.g., mRNA) vaccine comprises a RNA (e.g., mRNA) polynucleotide encoding VEEV antigenic polypeptide, a SINV antigenic polypeptide, a CHIKV antigenic polypeptide and a YFV antigenic polypeptide.

[0670] In some embodiments, a combination RNA (e.g., mRNA) vaccine comprises a RNA (e.g., mRNA) polynucleotide encoding VEEV antigenic polypeptide, a SINV antigenic polypeptide, a DENV antigenic polypeptide and a ZIKV antigenic polypeptide.

[0671] In some embodiments, a combination RNA (e.g., mRNA) vaccine comprises a RNA (e.g., mRNA) polynucleotide encoding VEEV antigenic polypeptide, a SINV antigenic polypeptide, a DENV antigenic polypeptide and a YFV antigenic polypeptide.

[0672] In some embodiments, a combination RNA (e.g., mRNA) vaccine comprises a RNA (e.g., mRNA) polynucleotide encoding VEEV antigenic polypeptide, a SINV antigenic polypeptide, a ZIKV antigenic polypeptide and a YFV antigenic polypeptide.

[0673] In some embodiments, a combination RNA (e.g., mRNA) vaccine comprises a RNA (e.g., mRNA) polynucleotide encoding VEEV antigenic polypeptide, a CHIKV antigenic polypeptide, a DENV antigenic polypeptide and a ZIKV antigenic polypeptide.

[0674] In some embodiments, a combination RNA (e.g., mRNA) vaccine comprises a RNA (e.g., mRNA) polynucleotide encoding VEEV antigenic polypeptide, a CHIKV antigenic polypeptide, a DENV antigenic polypeptide and a YFV antigenic polypeptide.

[0675] In some embodiments, a combination RNA (e.g., mRNA) vaccine comprises a RNA (e.g., mRNA) polynucleotide encoding VEEV antigenic polypeptide, a CHIKV antigenic polypeptide, a ZIKV antigenic polypeptide and a YFV antigenic polypeptide.

[0676] In some embodiments, a combination RNA (e.g., mRNA) vaccine comprises a RNA (e.g., mRNA) polynucleotide encoding VEEV antigenic polypeptide, a DENV antigenic polypeptide, a ZIKV antigenic polypeptide and a YFV antigenic polypeptide.

[0677] In some embodiments, a combination RNA (e.g., mRNA) vaccine comprises a RNA (e.g., mRNA) polynucleotide encoding SINV antigenic polypeptide, a CHIKV antigenic polypeptide, a DENV antigenic polypeptide and a ZIKV antigenic polypeptide.

[0678] In some embodiments, a combination RNA (e.g., mRNA) vaccine comprises a RNA (e.g., mRNA) polynucleotide encoding SINV antigenic polypeptide, a CHIKV antigenic polypeptide, a DENV antigenic polypeptide and a YFV antigenic polypeptide.

[0679] In some embodiments, a combination RNA (e.g., mRNA) vaccine comprises a RNA (e.g., mRNA) polynucleotide encoding SINV antigenic polypeptide, a CHIKV antigenic polypeptide, a ZIKV antigenic polypeptide and a YFV antigenic polypeptide.

[0680] In some embodiments, a combination RNA (e.g., mRNA) vaccine comprises a RNA (e.g., mRNA) polynucleotide encoding SINV antigenic polypeptide, a DENV antigenic polypeptide, a ZIKV antigenic polypeptide and a YFV antigenic polypeptide.

[0681] In some embodiments, a combination RNA (e.g., mRNA) vaccine comprises a RNA (e.g., mRNA) polynucleotide encoding CHIKV antigenic polypeptide, a DENV antigenic polypeptide, a ZIKV antigenic polypeptide and a YFV antigenic polypeptide.

[0682] In some embodiments, a combination RNA (e.g., mRNA) vaccine comprises a RNA (e.g., mRNA) polynucleotide encoding a JEV antigenic polypeptide, a WNV antigenic polypeptide, a EEEV antigenic polypeptide, a VEEV antigenic polypeptide, a SINV antigenic polypeptide, a CHIKV antigenic polypeptide, a DENV antigenic polypeptide, a ZIKV antigenic polypeptide and a YFV antigenic polypeptide.

[0683] In some embodiments, a combination RNA (e.g., mRNA) vaccine comprises a RNA (e.g., mRNA) polynucleotide encoding a Malaria (e.g., P. falciparum, P. vivax, P. malariae and/or P. ovale) antigenic polypeptide, a WNV antigenic polypeptide, a EEEV antigenic polypeptide, a VEEV antigenic polypeptide, a SINV antigenic polypeptide, a CHIKV antigenic polypeptide, a DENV antigenic polypeptide, a ZIKV antigenic polypeptide and a YFV antigenic polypeptide.

[0684] In some embodiments, a combination RNA (e.g., mRNA) vaccine comprises a RNA (e.g., mRNA) polynucleotide encoding a Malaria (e.g., P. falciparum, P. vivax, P. malariae and/or P. ovale) antigenic polypeptide, a JEV antigenic polypeptide, a EEEV antigenic polypeptide, a VEEV antigenic polypeptide, a SINV antigenic polypeptide, a CHIKV antigenic polypeptide, a DENV antigenic polypeptide, a ZIKV antigenic polypeptide and a YFV antigenic polypeptide.

[0685] In some embodiments, a combination RNA (e.g., mRNA) vaccine comprises a RNA (e.g., mRNA) polynucleotide encoding a Malaria (e.g., P. falciparum, P. vivax, P. malariae and/or P. ovale) antigenic polypeptide, a JEV antigenic polypeptide, a WNV antigenic polypeptide, a VEEV antigenic polypeptide, a SINV antigenic polypeptide, a CHIKV antigenic polypeptide, a DENV antigenic polypeptide, a ZIKV antigenic polypeptide and a YFV antigenic polypeptide.

[0686] In some embodiments, a combination RNA (e.g., mRNA) vaccine comprises a RNA (e.g., mRNA) polynucleotide encoding a Malaria (e.g., P. falciparum, P. vivax, P. malariae and/or P. ovale) antigenic polypeptide, a JEV antigenic polypeptide, a WNV antigenic polypeptide, a EEEV antigenic polypeptide, a SINV antigenic polypeptide, a CHIKV antigenic polypeptide, a DENV antigenic polypeptide, a ZIKV antigenic polypeptide and a YFV antigenic polypeptide.

[0687] In some embodiments, a combination RNA (e.g., mRNA) vaccine comprises a RNA (e.g., mRNA) polynucleotide encoding a Malaria (e.g., P. falciparum, P. vivax, P. malariae and/or P. ovale) antigenic polypeptide, a JEV antigenic polypeptide, a WNV antigenic polypeptide, a EEEV antigenic polypeptide, a VEEV antigenic polypeptide, a CHIKV antigenic polypeptide, a DENV antigenic polypeptide, a ZIKV antigenic polypeptide and a YFV antigenic polypeptide.

[0688] In some embodiments, a combination RNA (e.g., mRNA) vaccine comprises a RNA (e.g., mRNA) polynucleotide encoding a Malaria (e.g., P. falciparum, P. vivax, P. malariae and/or P. ovale) antigenic polypeptide, a JEV antigenic polypeptide, a WNV antigenic polypeptide, a EEEV antigenic polypeptide, a VEEV antigenic polypeptide, a SINV antigenic polypeptide, a DENV antigenic polypeptide, a ZIKV antigenic polypeptide and a YFV antigenic polypeptide.

[0689] In some embodiments, a combination RNA (e.g., mRNA) vaccine comprises a RNA (e.g., mRNA) polynucleotide encoding a Malaria (e.g., P. falciparum, P. vivax, P. malariae and/or P. ovale) antigenic polypeptide, a JEV antigenic polypeptide, a WNV antigenic polypeptide, a EEEV antigenic polypeptide, a VEEV antigenic polypeptide, a SINV antigenic polypeptide, a CHIKV antigenic polypeptide, a ZIKV antigenic polypeptide and a YFV antigenic polypeptide.

[0690] In some embodiments, a combination RNA (e.g., mRNA) vaccine comprises a RNA (e.g., mRNA) polynucleotide encoding a Malaria (e.g., P. falciparum, P. vivax, P. malariae and/or P. ovale) antigenic polypeptide, a JEV antigenic polypeptide, a WNV antigenic polypeptide, a EEEV antigenic polypeptide, a VEEV antigenic polypeptide, a SINV antigenic polypeptide, a CHIKV antigenic polypeptide, a DENV antigenic polypeptide, and a YFV antigenic polypeptide.

[0691] In some embodiments, a combination RNA (e.g., mRNA) vaccine comprises a RNA (e.g., mRNA) polynucleotide encoding a Malaria (e.g., P. falciparum, P. vivax, P. malariae and/or P. ovale) antigenic polypeptide, a JEV antigenic polypeptide, a WNV antigenic polypeptide, a EEEV antigenic polypeptide, a VEEV antigenic polypeptide, a SINV antigenic polypeptide, a CHIKV antigenic polypeptide, a DENV antigenic polypeptide, and a ZIKV antigenic polypeptide.

[0692] In some embodiments, a combination RNA (e.g., mRNA) vaccine comprises a RNA (e.g., mRNA) polynucleotide encoding a JEV antigenic polypeptide, a WNV antigenic polypeptide, a EEEV antigenic polypeptide, a VEEV antigenic polypeptide, and a SINV antigenic polypeptide.

[0693] In some embodiments, a combination RNA (e.g., mRNA) vaccine comprises a RNA (e.g., mRNA) polynucleotide encoding a JEV antigenic polypeptide, a WNV antigenic polypeptide, a EEEV antigenic polypeptide, a VEEV antigenic polypeptide, a SINV antigenic polypeptide, and a CHIKV antigenic polypeptide.

[0694] In some embodiments, a combination RNA (e.g., mRNA) vaccine comprises a RNA (e.g., mRNA) polynucleotide encoding a JEV antigenic polypeptide, a WNV antigenic polypeptide, a EEEV antigenic polypeptide, a SINV antigenic polypeptide, and a CHIKV antigenic polypeptide.

[0695] In some embodiments, a combination RNA (e.g., mRNA) vaccine comprises a RNA (e.g., mRNA) polynucleotide encoding a JEV antigenic polypeptide, a WNV antigenic polypeptide, a EEEV antigenic polypeptide, a SINV antigenic polypeptide, a CHIKV antigenic polypeptide and a DENV antigenic polypeptide.

[0696] In some embodiments, a combination RNA (e.g., mRNA) vaccine comprises at least two RNA (e.g., mRNA) polynucleotides selected from Malaria (e.g., P. falciparum, P. vivax, P. malariae and/or P. ovale) antigenic polypeptides, JEV antigenic polypeptides, WNV antigenic polypeptides, EEEV antigenic polypeptides, VEEV antigenic polypeptides, SINV antigenic polypeptides, CHIKV antigenic polypeptides, DENV antigenic polypeptides, ZIKV antigenic polypeptides and a YFV antigenic polypeptides.

[0697] In some embodiments, a combination RNA (e.g., mRNA) vaccine comprises at least three RNA (e.g., mRNA) polynucleotides selected from Malaria (e.g., P. falciparum, P. vivax, P. malariae and/or P. ovale) antigenic polypeptides, JEV antigenic polypeptides, WNV antigenic polypeptides, EEEV antigenic polypeptides, VEEV antigenic polypeptides, SINV antigenic polypeptides, CHIKV antigenic polypeptides, DENV antigenic polypeptides, ZIKV antigenic polypeptides and a YFV antigenic polypeptides.

[0698] In some embodiments, a combination RNA (e.g., mRNA) vaccine comprises at least four RNA (e.g., mRNA) polynucleotides selected from Malaria (e.g., P. falciparum, P. vivax, P. malariae and/or P. ovale) antigenic polypeptides, JEV antigenic polypeptides, WNV antigenic polypeptides, EEEV antigenic polypeptides, VEEV antigenic polypeptides, SINV antigenic polypeptides, CHIKV antigenic polypeptides, DENV antigenic polypeptides, ZIKV antigenic polypeptides and a YFV antigenic polypeptides.

[0699] In some embodiments, a combination RNA (e.g., mRNA) vaccine comprises at least five RNA (e.g., mRNA) polynucleotides selected from Malaria (e.g., P. falciparum, P. vivax, P. malariae and/or P. ovale) antigenic polypeptides, JEV antigenic polypeptides, WNV antigenic polypeptides, EEEV antigenic polypeptides, VEEV antigenic polypeptides, SINV antigenic polypeptides, CHIKV antigenic polypeptides, DENV antigenic polypeptides, ZIKV antigenic polypeptides and a YFV antigenic polypeptides.

[0700] In some embodiments, a combination RNA (e.g., mRNA) vaccine comprises at least six RNA (e.g., mRNA) polynucleotides selected from Malaria (e.g., P. falciparum, P. vivax, P. malariae and/or P. ovale) antigenic polypeptides, JEV antigenic polypeptides, WNV antigenic polypeptides, EEEV antigenic polypeptides, VEEV antigenic polypeptides, SINV antigenic polypeptides, CHIKV antigenic polypeptides, DENV antigenic polypeptides, ZIKV antigenic polypeptides and a YFV antigenic polypeptides.

[0701] In some embodiments, a combination RNA (e.g., mRNA) vaccine comprises at least seven RNA (e.g., mRNA) polynucleotides selected from Malaria (e.g., P. falciparum, P. vivax, P. malariae and/or P. ovale) antigenic polypeptides, JEV antigenic polypeptides, WNV antigenic polypeptides, EEEV antigenic polypeptides, VEEV antigenic polypeptides, SINV antigenic polypeptides, CHIKV antigenic polypeptides, DENV antigenic polypeptides, ZIKV antigenic polypeptides and a YFV antigenic polypeptides.

[0702] In some embodiments, a combination RNA (e.g., mRNA) vaccine comprises at least eight RNA (e.g., mRNA) polynucleotides selected from Malaria (e.g., P. falciparum, P. vivax, P. malariae and/or P. ovale) antigenic polypeptides, JEV antigenic polypeptides, WNV antigenic polypeptides, EEEV antigenic polypeptides, VEEV antigenic polypeptides, SINV antigenic polypeptides, CHIKV antigenic polypeptides, DENV antigenic polypeptides, ZIKV antigenic polypeptides and a YFV antigenic polypeptides.

[0703] In some embodiments, a combination RNA (e.g., mRNA) vaccine comprises at least nine RNA (e.g., mRNA) polynucleotides selected from Malaria (e.g., P. falciparum, P. vivax, P. malariae and/or P. ovale) antigenic polypeptides, JEV antigenic polypeptides, WNV antigenic polypeptides, EEEV antigenic polypeptides, VEEV antigenic polypeptides, SINV antigenic polypeptides, CHIKV antigenic polypeptides, DENV antigenic polypeptides, ZIKV antigenic polypeptides and a YFV antigenic polypeptides.

[0704] In some embodiments, a combination RNA (e.g., mRNA) vaccine comprises at least ten RNA (e.g., mRNA) polynucleotides selected from Malaria (e.g., P. falciparum, P. vivax, P. malariae and/or P. ovale) antigenic polypeptides, JEV antigenic polypeptides, WNV antigenic polypeptides, EEEV antigenic polypeptides, VEEV antigenic polypeptides, SINV antigenic polypeptides, CHIKV antigenic polypeptides, DENV antigenic polypeptides, ZIKV antigenic polypeptides and a YFV antigenic polypeptides.

[0705] Additional combination vaccines are encompassed by the following numbered paragraphs:
[0706] 1. A combination vaccine comprising at least one RNA (e.g., mRNA) encoding at least one tropical disease antigenic polypeptide.
[0707] 2. The combination vaccine of paragraph 1, wherein the at least one polypeptide is at least one Malaria (e.g., P. falciparum, P. vivax, P. malariae and/or P. ovale) antigenic polypeptide.
[0708] 3. The combination vaccine of paragraph 1 or 2, wherein the at least one polypeptide is at least one JEV antigenic polypeptide.
[0709] 4. The combination vaccine of any one of paragraphs 1-3, wherein the at least one polypeptide is at least one WNV antigenic polypeptide.
[0710] 5. The combination vaccine of any one of paragraphs 1-4, wherein the at least one polypeptide is at least one EEEV antigenic polypeptide.
[0711] 6. The combination vaccine of any one of paragraphs 1-5, wherein the at least one polypeptide is at least one VEEV antigenic polypeptide.
[0712] 7. The combination vaccine of any one of paragraphs 1-6, wherein the at least one polypeptide is at least one SINV antigenic polypeptide.
[0713] 8. The combination vaccine of any one of paragraphs 1-7, wherein the at least one polypeptide is at least one CHIKV antigenic polypeptide.
[0714] 9. The combination vaccine of any one of paragraphs 1-8, wherein the at least one polypeptide is at least one DENV antigenic polypeptide.
[0715] 10. The combination vaccine of any one of paragraphs 1-9, wherein the at least one polypeptide is at least one ZIKV antigenic polypeptide.
[0716] 11. The combination vaccine of any one of paragraphs 1-10, wherein the at least one polypeptide is at least one YFV antigenic polypeptide.

[0717] It has been discovered that the mRNA vaccines described herein are superior to current vaccines in several ways. First, the lipid nanoparticle (LNP) delivery is superior to other formulations including a protamine base approach described in the literature and no additional adjuvants are to be necessary. The use of LNPs enables the effective delivery of chemically modified or unmodified mRNA vaccines. Additionally it has been demonstrated herein that both modified and unmodified LNP formulated mRNA vaccines were superior to conventional vaccines by a significant degree. In some embodiments the mRNA vaccines of the invention are superior to conventional vaccines by a factor of at least 10 fold, 20 fold, 40 fold, 50 fold, 100 fold, 500 fold or 1,000 fold.

[0718] Although attempts have been made to produce functional RNA vaccines, including mRNA vaccines and self-replicating RNA vaccines, the therapeutic efficacy of these RNA vaccines has not yet been fully established. Quite surprisingly, the inventors have discovered, according to aspects of the invention a class of formulations for delivering mRNA vaccines in vivo that results in significantly enhanced, and in many respects synergistic, immune responses including enhanced antigen generation and functional antibody production with neutralization capability. These results can be achieved even when significantly lower doses of the mRNA are administered in comparison with mRNA doses used in other classes of lipid based formulations. The formulations of the invention have demonstrated significant unexpected in vivo immune responses sufficient to establish the efficacy of functional mRNA vaccines as prophylactic and therapeutic agents. Additionally, self-replicating RNA vaccines rely on viral replication pathways to deliver enough RNA to a cell to produce an immunogenic response. The formulations of the invention do not require viral replication to produce enough protein to result in a strong immune response. Thus, the mRNA of the invention are not self-replicating RNA and do not include components necessary for viral replication.

[0719] The invention involves, in some aspects, the surprising finding that lipid nanoparticle (LNP) formulations significantly enhance the effectiveness of mRNA vaccines, including chemically modified and unmodified mRNA vaccines. The efficacy of mRNA vaccines formulated in LNP was examined in vivo using several distinct antigens. The results presented herein demonstrate the unexpected superior efficacy of the mRNA vaccines formulated in LNP over other commercially available vaccines.

[0720] In addition to providing an enhanced immune response, the formulations of the invention generate a more rapid immune response with fewer doses of antigen than other vaccines tested. The mRNA-LNP formulations of the invention also produce quantitatively and qualitatively better immune responses than vaccines formulated in a different carriers.

[0721] The data described herein demonstrate that the formulations of the invention produced significant unexpected improvements over existing antigen vaccines. Additionally, the mRNA-LNP formulations of the invention are superior to other vaccines even when the dose of mRNA is lower than other vaccines.

[0722] The LNP used in the studies described herein has been used previously to deliver siRNA in various animal models as well as in humans. In view of the observations made in association with the siRNA delivery of LNP formulations, the fact that LNP is useful in vaccines is quite surprising. It has been observed that therapeutic delivery of siRNA formulated in LNP causes an undesirable inflammatory response associated with a transient IgM response, typically leading to a reduction in antigen production and a compromised immune response. In contrast to the findings observed with siRNA, the LNP-mRNA formulations of the invention are demonstrated herein to generate enhanced IgG levels, sufficient for prophylactic and therapeutic methods rather than transient IgM responses.

### Nucleic Acids/Polynucleotides

[0723] Tropical disease vaccines, as provided herein, comprise at least one (one or more) ribonucleic acid (RNA) (e.g., mRNA) polynucleotide having an open reading frame encoding at least one Malaria (e.g., P. falciparum, P. vivax, P. malariae and/or P. ovale), JEV, WNV, EEEV, VEEV, SINV, CHIKV, DENV, ZIKV and/or YFV antigenic polypeptide. The term “nucleic acid” includes any compound and/or substance that comprises a polymer of nucleotides (nucleotide monomer). These polymers are referred to as polynucleotides. Thus, the terms “nucleic acid” and “polynucleotide” are used interchangeably.

[0724] Nucleic acids may be or may include, for example, ribonucleic acids (RNAs), deoxyribonucleic acids (DNAs), threose nucleic acids (TNAs), glycol nucleic acids (GNAs), peptide nucleic acids (PNAs), locked nucleic acids (LNAs, including LNA having a β-D-ribo configuration, α-LNA having an α-L-ribo configuration (a diastereomer of LNA), 2′-amino-LNA having a 2′-amino functionalization, and 2′-amino-α-LNA having a 2′-amino functionalization), ethylene nucleic acids (ENA), cyclohexenyl nucleic acids (CeNA) or chimeras or combinations thereof.

[0725] In some embodiments, polynucleotides of the present disclosure function as messenger RNA (mRNA). “Messenger RNA” (mRNA) refers to any polynucleotide that encodes a (at least one) polypeptide (a naturally-occurring, non-naturally-occurring, or modified polymer of amino acids) and can be translated to produce the encoded polypeptide in vitro, in vivo, in situ or ex vivo. The skilled artisan will appreciate that, except where otherwise noted, polynucleotide sequences set forth in the instant application will recite “T”s in a representative DNA sequence but where the sequence represents RNA (e.g., mRNA), the “T”'s would be substituted for “U”s. Thus, any of the RNA polynucleotides encoded by a DNA identified by a particular sequence identification number may also comprise the corresponding RNA (e.g., mRNA) sequence encoded by the DNA, where each “T” of the DNA sequence is substituted with “U.”

[0726] The basic components of an mRNA molecule typically include at least one coding region, a 5′ untranslated region (UTR), a 3′ UTR, a 5′ cap and a poly-A tail. Polynucleotides of the present disclosure may function as mRNA but can be distinguished from wild-type mRNA in their functional and/or structural design features, which serve to overcome existing problems of effective polypeptide expression using nucleic-acid based therapeutics.

[0727] In some embodiments, a RNA polynucleotide of an RNA (e.g., mRNA) vaccine encodes 2-10, 2-9, 2-8, 2-7, 2-6, 2-5, 2-4, 2-3, 3-10, 3-9, 3-8, 3-7, 3-6, 3-5, 3-4, 4-10, 4-9, 4-8, 4-7, 4-6, 4-5, 5-10, 5-9, 5-8, 5-7, 5-6, 6-10, 6-9, 6-8, 6-7, 7-10, 7-9, 7-8, 8-10, 8-9 or 9-10 antigenic polypeptides. In some embodiments, a RNA (e.g., mRNA) polynucleotide of a tropical disease vaccine encodes at least 10, 20, 30, 40, 50, 60, 70, 80, 90 or 100 antigenic polypeptides. In some embodiments, a RNA (e.g., mRNA) polynucleotide of a tropical disease vaccine encodes at least 100 or at least 200 antigenic polypeptides. In some embodiments, a RNA polynucleotide of a tropical disease vaccine encodes 1-10, 5-15, 10-20, 15-25, 20-30, 25-35, 30-40, 35-45, 40-50, 1-50, 1-100, 2-50 or 2-100 antigenic polypeptides.

[0728] Polynucleotides of the present disclosure, in some embodiments, are codon optimized. Codon optimization methods are known in the art and may be used as provided herein. Codon optimization, in some embodiments, may be used to match codon frequencies in target and host organisms to ensure proper folding; bias GC content to increase mRNA stability or reduce secondary structures; minimize tandem repeat codons or base runs that may impair gene construction or expression; customize transcriptional and translational control regions; insert or remove protein trafficking sequences; remove/add post translation modification sites in encoded protein (e.g. glycosylation sites); add, remove or shuffle protein domains; insert or delete restriction sites; modify ribosome binding sites and mRNA degradation sites; adjust translational rates to allow the various domains of the protein to fold properly; or to reduce or eliminate problem secondary structures within the polynucleotide. Codon optimization tools, algorithms and services are known in the art-non-limiting examples include services from GeneArt (Life Technologies), DNA2.0 (Menlo Park CA) and/or proprietary methods. In some embodiments, the open reading frame (ORF) sequence is optimized using optimization algorithms.

[0729] In some embodiments, a codon optimized sequence shares less than 95% sequence identity, less than 90% sequence identity, less than 85% sequence identity, less than 80% sequence identity, or less than 75% sequence identity to a naturally-occurring or wild-type sequence (e.g., a naturally-occurring or wild-type mRNA sequence encoding a polypeptide or protein of interest (e.g., an antigenic protein or antigenic polypeptide)).

[0730] In some embodiments, a codon-optimized sequence shares between 65% and 85% (e.g., between about 67% and about 85%, or between about 67% and about 80%) sequence identity to a naturally-occurring sequence or a wild-type sequence (e.g., a naturally-occurring or wild-type mRNA sequence encoding a polypeptide or protein of interest (e.g., an antigenic protein or polypeptide)). In some embodiments, a codon-optimized sequence shares between 65% and 75%, or about 80% sequence identity to a naturally-occurring sequence or wild-type sequence (e.g., a naturally-occurring or wild-type mRNA sequence encoding a polypeptide or protein of interest (e.g., an antigenic protein or polypeptide)).

[0731] In some embodiments a codon-optimized RNA (e.g., mRNA) may, for instance, be one in which the levels of G/C are enhanced. The G/C-content of nucleic acid molecules may influence the stability of the RNA. RNA having an increased amount of guanine (G) and/or cytosine (C) residues may be functionally more stable than nucleic acids containing a large amount of adenine (A) and thymine (T) or uracil (U) nucleotides. WO02/098443 discloses a pharmaceutical composition containing an mRNA stabilized by sequence modifications in the translated region. Due to the degeneracy of the genetic code, the modifications work by substituting existing codons for those that promote greater RNA stability without changing the resulting amino acid. The approach is limited to coding regions of the RNA.

### Antigens/Antigenic Polypeptides

[0732] In some embodiments, an antigenic polypeptide (e.g., at least one Malaria (e.g., P. falciparum, P. vivax, P. malariae and/or P. ovale), JEV, WNV, EEEV, VEEV, SINV, CHIKV, DENV, ZIKV and/or YFV antigenic polypeptide) is longer than 25 amino acids and shorter than 50 amino acids. Polypeptides include gene products, naturally occurring polypeptides, synthetic polypeptides, homologs, orthologs, paralogs, fragments and other equivalents, variants, and analogs of the foregoing. A polypeptide may be a single molecule or may be a multi-molecular complex such as a dimer, trimer or tetramer. Polypeptides may also comprise single chain polypeptides or multichain polypeptides, such as antibodies or insulin, and may be associated or linked to each other. Most commonly, disulfide linkages are found in multichain polypeptides. The term “polypeptide” may also apply to amino acid polymers in which at least one amino acid residue is an artificial chemical analogue of a corresponding naturally-occurring amino acid.

[0733] A “polypeptide variant” is a molecule that differs in its amino acid sequence relative to a native sequence or a reference sequence. Amino acid sequence variants may possess substitutions, deletions, insertions, or a combination of any two or three of the foregoing, at certain positions within the amino acid sequence, as compared to a native sequence or a reference sequence. Ordinarily, variants possess at least 50% identity to a native sequence or a reference sequence. In some embodiments, variants share at least 80% identity or at least 90% identity with a native sequence or a reference sequence.

[0734] In some embodiments “variant mimics” are provided. A “variant mimic” contains at least one amino acid that would mimic an activated sequence. For example, glutamate may serve as a mimic for phosphoro-threonine and/or phosphoro-serine. Alternatively, variant mimics may result in deactivation or in an inactivated product containing the mimic. For example, phenylalanine may act as an inactivating substitution for tyrosine, or alanine may act as an inactivating substitution for serine.

[0735] “Orthologs” refers to genes in different species that evolved from a common ancestral gene by speciation. Normally, orthologs retain the same function in the course of evolution. Identification of orthologs is important for reliable prediction of gene function in newly sequenced genomes.

[0736] “Analogs” is meant to include polypeptide variants that differ by one or more amino acid alterations, for example, substitutions, additions or deletions of amino acid residues that still maintain one or more of the properties of the parent or starting polypeptide.

[0737] The present disclosure provides several types of compositions that are polynucleotide or polypeptide based, including variants and derivatives. These include, for example, substitutional, insertional, deletion and covalent variants and derivatives. The term “derivative” is synonymous with the term “variant” and generally refers to a molecule that has been modified and/or changed in any way relative to a reference molecule or a starting molecule.

[0738] As such, polynucleotides encoding peptides or polypeptides containing substitutions, insertions and/or additions, deletions and covalent modifications with respect to reference sequences, in particular the polypeptide sequences disclosed herein, are included within the scope of this disclosure. For example, sequence tags or amino acids, such as one or more lysines, can be added to peptide sequences (e.g., at the N-terminal or C-terminal ends). Sequence tags can be used for peptide detection, purification or localization. Lysines can be used to increase peptide solubility or to allow for biotinylation. Alternatively, amino acid residues located at the carboxy and amino terminal regions of the amino acid sequence of a peptide or protein may optionally be deleted providing for truncated sequences. Certain amino acids (e.g., C-terminal residues or N-terminal residues) alternatively may be deleted depending on the use of the sequence, as for example, expression of the sequence as part of a larger sequence that is soluble, or linked to a solid support.

[0739] “Substitutional variants” when referring to polypeptides are those that have at least one amino acid residue in a native or starting sequence removed and a different amino acid inserted in its place at the same position. Substitutions may be single, where only one amino acid in the molecule has been substituted, or they may be multiple, where two or more (e.g., 3, 4 or 5) amino acids have been substituted in the same molecule.

[0740] As used herein the term “conservative amino acid substitution” refers to the substitution of an amino acid that is normally present in the sequence with a different amino acid of similar size, charge, or polarity. Examples of conservative substitutions include the substitution of a non-polar (hydrophobic) residue such as isoleucine, valine and leucine for another non-polar residue. Likewise, examples of conservative substitutions include the substitution of one polar (hydrophilic) residue for another such as between arginine and lysine, between glutamine and asparagine, and between glycine and serine. Additionally, the substitution of a basic residue such as lysine, arginine or histidine for another, or the substitution of one acidic residue such as aspartic acid or glutamic acid for another acidic residue are additional examples of conservative substitutions. Examples of non-conservative substitutions include the substitution of a non-polar (hydrophobic) amino acid residue such as isoleucine, valine, leucine, alanine, methionine for a polar (hydrophilic) residue such as cysteine, glutamine, glutamic acid or lysine and/or a polar residue for a non-polar residue.

[0741] “Features” when referring to polypeptide or polynucleotide are defined as distinct amino acid sequence-based or nucleotide-based components of a molecule respectively. Features of the polypeptides encoded by the polynucleotides include surface manifestations, local conformational shape, folds, loops, half-loops, domains, half-domains, sites, termini and any combination(s) thereof.

[0742] As used herein when referring to polypeptides the term “domain” refers to a motif of a polypeptide having one or more identifiable structural or functional characteristics or properties (e.g., binding capacity, serving as a site for protein-protein interactions).

[0743] As used herein when referring to polypeptides the terms “site” as it pertains to amino acid based embodiments is used synonymously with “amino acid residue” and “amino acid side chain.” As used herein when referring to polynucleotides the terms “site” as it pertains to nucleotide based embodiments is used synonymously with “nucleotide.” A site represents a position within a peptide or polypeptide or polynucleotide that may be modified, manipulated, altered, derivatized or varied within the polypeptide-based or polynucleotide-based molecules.

[0744] As used herein the terms “termini” or “terminus” when referring to polypeptides or polynucleotides refer to an extremity of a polypeptide or polynucleotide respectively. Such extremity is not limited only to the first or final site of the polypeptide or polynucleotide but may include additional amino acids or nucleotides in the terminal regions. Polypeptide-based molecules may be characterized as having both an N-terminus (terminated by an amino acid with a free amino group (NH₂)) and a C-terminus (terminated by an amino acid with a free carboxyl group (COOH)). Proteins are in some cases made up of multiple polypeptide chains brought together by disulfide bonds or by non-covalent forces (multimers, oligomers). These proteins have multiple N- and C-termini. Alternatively, the termini of the polypeptides may be modified such that they begin or end, as the case may be, with a non-polypeptide based moiety such as an organic conjugate.

[0745] As recognized by those skilled in the art, protein fragments, functional protein domains, and homologous proteins are also considered to be within the scope of polypeptides of interest. For example, provided herein is any protein fragment (meaning a polypeptide sequence at least one amino acid residue shorter than a reference polypeptide sequence but otherwise identical) of a reference protein having a length of 10, 20, 30, 40, 50, 60, 70, 80, 90, 100 or longer than 100 amino acids. In another example, any protein that includes a stretch of 20, 30, 40, 50, or 100 (contiguous) amino acids that are 40%, 50%, 60%, 70%, 80%, 90%, 95%, or 100% identical to any of the sequences described herein can be utilized in accordance with the disclosure. In some embodiments, a polypeptide includes 2, 3, 4, 5, 6, 7, 8, 9, 10, or more mutations as shown in any of the sequences provided herein or referenced herein. In another example, any protein that includes a stretch of 20, 30, 40, 50, or 100 amino acids that are greater than 80%, 90%, 95%, or 100% identical to any of the sequences described herein, wherein the protein has a stretch of 5, 10, 15, 20, 25, or 30 amino acids that are less than 80%, 75%, 70%, 65% to 60% identical to any of the sequences described herein can be utilized in accordance with the disclosure.

[0746] Polypeptide or polynucleotide molecules of the present disclosure may share a certain degree of sequence similarity or identity with the reference molecules (e.g., reference polypeptides or reference polynucleotides), for example, with art-described molecules (e.g., engineered or designed molecules or wild-type molecules). The term “identity,” as known in the art, refers to a relationship between the sequences of two or more polypeptides or polynucleotides, as determined by comparing the sequences. In the art, identity also means the degree of sequence relatedness between two sequences as determined by the number of matches between strings of two or more amino acid residues or nucleic acid residues. Identity measures the percent of identical matches between the smaller of two or more sequences with gap alignments (if any) addressed by a particular mathematical model or computer program (e.g., “algorithms”). Identity of related peptides can be readily calculated by known methods. “% identity” as it applies to polypeptide or polynucleotide sequences is defined as the percentage of residues (amino acid residues or nucleic acid residues) in the candidate amino acid or nucleic acid sequence that are identical with the residues in the amino acid sequence or nucleic acid sequence of a second sequence after aligning the sequences and introducing gaps, if necessary, to achieve the maximum percent identity. Methods and computer programs for the alignment are well known in the art. Identity depends on a calculation of percent identity but may differ in value due to gaps and penalties introduced in the calculation. Generally, variants of a particular polynucleotide or polypeptide have at least 40%, 45%, 50%, 55%, 60%, 65%, 70%, 75%, 80%, 85%, 90%, 91%, 92%, 93%, 94%, 95%, 96%, 97%, 98%, 99% but less than 100% sequence identity to that particular reference polynucleotide or polypeptide as determined by sequence alignment programs and parameters described herein and known to those skilled in the art. Such tools for alignment include those of the BLAST suite (Stephen F. Altschul, et al. (1997). “Gapped BLAST and PSI-BLAST: a new generation of protein database search programs,” Nucleic Acids Res. 25:3389-3402). Another popular local alignment technique is based on the Smith-Waterman algorithm (Smith, T. F. & Waterman, M. S. (1981) “Identification of common molecular subsequences.” J. Mol. Biol. 147:195-197). A general global alignment technique based on dynamic programming is the Needleman-Wunsch algorithm (Needleman, S. B. & Wunsch, C. D. (1970) “A general method applicable to the search for similarities in the amino acid sequences of two proteins.” J. Mol. Biol. 48:443-453). More recently, a Fast Optimal Global Sequence Alignment Algorithm (FOGSAA) was developed that purportedly produces global alignment of nucleotide and protein sequences faster than other optimal global alignment methods, including the Needleman-Wunsch algorithm. Other tools are described herein, specifically in the definition of “identity” below.

[0747] As used herein, the term “homology” refers to the overall relatedness between polymeric molecules, e.g. between nucleic acid molecules (e.g. DNA molecules and/or RNA molecules) and/or between polypeptide molecules. Polymeric molecules (e.g. nucleic acid molecules (e.g. DNA molecules and/or RNA molecules) and/or polypeptide molecules) that share a threshold level of similarity or identity determined by alignment of matching residues are termed homologous. Homology is a qualitative term that describes a relationship between molecules and can be based upon the quantitative similarity or identity. Similarity or identity is a quantitative term that defines the degree of sequence match between two compared sequences. In some embodiments, polymeric molecules are considered to be “homologous” to one another if their sequences are at least 25%, 30%, 35%, 40%, 45%, 50%, 55%, 60%, 65%, 70%, 75%, 80%, 85%, 90%, 95%, or 99% identical or similar. The term “homologous” necessarily refers to a comparison between at least two sequences (polynucleotide or polypeptide sequences). Two polynucleotide sequences are considered homologous if the polypeptides they encode are at least 50%, 60%, 70%, 80%, 90%, 95%, or even 99% for at least one stretch of at least 20 amino acids. In some embodiments, homologous polynucleotide sequences are characterized by the ability to encode a stretch of at least 4-5 uniquely specified amino acids. For polynucleotide sequences less than 60 nucleotides in length, homology is determined by the ability to encode a stretch of at least 4-5 uniquely specified amino acids. Two protein sequences are considered homologous if the proteins are at least 50%, 60%, 70%, 80%, or 90% identical for at least one stretch of at least 20 amino acids.

[0748] Homology implies that the compared sequences diverged in evolution from a common origin. The term “homolog” refers to a first amino acid sequence or nucleic acid sequence (e.g., gene (DNA or RNA) or protein sequence) that is related to a second amino acid sequence or nucleic acid sequence by descent from a common ancestral sequence. The term “homolog” may apply to the relationship between genes and/or proteins separated by the event of speciation or to the relationship between genes and/or proteins separated by the event of genetic duplication. “Orthologs” are genes (or proteins) in different species that evolved from a common ancestral gene (or protein) by speciation. Typically, orthologs retain the same function in the course of evolution. “Paralogs” are genes (or proteins) related by duplication within a genome. Orthologs retain the same function in the course of evolution, whereas paralogs evolve new functions, even if these are related to the original one.

[0749] The term “identity” refers to the overall relatedness between polymeric molecules, for example, between polynucleotide molecules (e.g. DNA molecules and/or RNA molecules) and/or between polypeptide molecules. Calculation of the percent identity of two polynucleic acid sequences, for example, can be performed by aligning the two sequences for optimal comparison purposes (e.g., gaps can be introduced in one or both of a first and a second nucleic acid sequences for optimal alignment and non-identical sequences can be disregarded for comparison purposes). In certain embodiments, the length of a sequence aligned for comparison purposes is at least 30%, at least 40%, at least 50%, at least 60%, at least 70%, at least 80%, at least 90%, at least 95%, or 100% of the length of the reference sequence. The nucleotides at corresponding nucleotide positions are then compared. When a position in the first sequence is occupied by the same nucleotide as the corresponding position in the second sequence, then the molecules are identical at that position. The percent identity between the two sequences is a function of the number of identical positions shared by the sequences, taking into account the number of gaps, and the length of each gap, which needs to be introduced for optimal alignment of the two sequences. The comparison of sequences and determination of percent identity between two sequences can be accomplished using a mathematical algorithm. For example, the percent identity between two nucleic acid sequences can be determined using methods such as those described in Computational Molecular Biology, Lesk, A. M., ed., Oxford University Press, New York, 1988; Biocomputing: Informatics and Genome Projects, Smith, D. W., ed., Academic Press, New York, 1993; Sequence Analysis in Molecular Biology, von Heinje, G., Academic Press, 1987; Computer Analysis of Sequence Data, Part I, Griffin, A. M., and Griffin, H. G., eds., Humana Press, New Jersey, 1994; and Sequence Analysis Primer, Gribskov, M. and Devereux, J., eds., M Stockton Press, New York, 1991; each of which is incorporated herein by reference. For example, the percent identity between two nucleic acid sequences can be determined using the algorithm of Meyers and Miller (CABIOS, 1989, 4:11-17), which has been incorporated into the ALIGN program (version 2.0) using a PAM120 weight residue table, a gap length penalty of 12 and a gap penalty of 4. The percent identity between two nucleic acid sequences can, alternatively, be determined using the GAP program in the GCG software package using an NWSgapdna.CMP matrix. Methods commonly employed to determine percent identity between sequences include, but are not limited to those disclosed in Carillo, H., and Lipman, D., SIAM J Applied Math., 48:1073 (1988); incorporated herein by reference. Techniques for determining identity are codified in publicly available computer programs. Exemplary computer software to determine homology between two sequences include, but are not limited to, GCG program package, Devereux, J., et al., Nucleic Acids Research, 12, 387 (1984)), BLASTP, BLASTN, and FASTA Altschul, S. F. et al., J. Molec. Biol., 215, 403 (1990)).

### Multiprotein and Multicomponent Vaccines

[0750] The present disclosure encompasses tropical disease vaccines comprising multiple RNA (e.g., mRNA) polynucleotides, each encoding a single antigenic polypeptide, as well as tropical disease vaccines comprising a single RNA polynucleotide encoding more than one antigenic polypeptide (e.g., as a fusion polypeptide). Thus, a vaccine composition comprising a RNA (e.g., mRNA) polynucleotide having an open reading frame encoding a first antigenic polypeptide and a RNA (e.g., mRNA) polynucleotide having an open reading frame encoding a second antigenic polypeptide encompasses (a) vaccines that comprise a first RNA polynucleotide encoding a first antigenic polypeptide and a second RNA polynucleotide encoding a second antigenic polypeptide, and (b) vaccines that comprise a single RNA polynucleotide encoding a first and second antigenic polypeptide (e.g., as a fusion polypeptide). RNA (e.g., mRNA) vaccines of the present disclosure, in some embodiments, comprise 2-10 (e.g., 2, 3, 4, 5, 6, 7, 8, 9 or 10), or more, RNA polynucleotides having an open reading frame, each of which encodes a different antigenic polypeptide (or a single RNA polynucleotide encoding 2-10, or more, different antigenic polypeptides). The antigenic polypeptides may be selected from Malaria (e.g., P. falciparum, P. vivax, P. malariae and/or P. ovale), JEV, WNV, EEEV, VEEV, SINV, CHIKV, DENV, ZIKV and YFV antigenic polypeptides.

[0751] In some embodiments, a tropical disease vaccine comprises a RNA (e.g., mRNA) polynucleotide having an open reading frame encoding a viral capsid protein, a RNA (e.g., mRNA) polynucleotide having an open reading frame encoding a viral premembrane/membrane protein, and a RNA (e.g., mRNA) polynucleotide having an open reading frame encoding a viral envelope protein. In some embodiments, a tropical disease vaccine comprises a RNA (e.g., mRNA) polynucleotide having an open reading frame encoding a viral fusion (F) protein and a RNA polynucleotide having an open reading frame encoding a viral major surface glycoprotein (G protein). In some embodiments, a vaccine comprises a RNA (e.g., mRNA) polynucleotide having an open reading frame encoding a viral F protein. In some embodiments, a vaccine comprises a RNA (e.g., mRNA) polynucleotide having an open reading frame encoding a viral G protein. In some embodiments, a vaccine comprises a RNA (e.g., mRNA) polynucleotide having an open reading frame encoding a HN protein.

[0752] In some embodiments, a multicomponent vaccine comprises at least one RNA (e.g., mRNA) polynucleotide encoding at least one antigenic polypeptide fused to a signal peptide (e.g., SEQ ID NO: 304-307). The signal peptide may be fused at the N-terminus or the C-terminus of an antigenic polypeptide. An antigenic polypeptide fused to a signal peptide may be selected from Malaria (e.g., P. falciparum, P. vivax, P. malariae and/or P. ovale), JEV, WNV, EEEV, VEEV, SINV, CHIKV, DENV, ZIKV and YFV antigenic polypeptides.

### Signal Peptides

[0753] In some embodiments, antigenic polypeptides encoded by tropical disease RNA (e.g., mRNA) polynucleotides comprise a signal peptide. Signal peptides, comprising the N-terminal 15-60 amino acids of proteins, are typically needed for the translocation across the membrane on the secretory pathway and, thus, universally control the entry of most proteins both in eukaryotes and prokaryotes to the secretory pathway. Signal peptides generally include three regions: an N-terminal region of differing length, which usually comprises positively charged amino acids; a hydrophobic region; and a short carboxy-terminal peptide region. In eukaryotes, the signal peptide of a nascent precursor protein (pre-protein) directs the ribosome to the rough endoplasmic reticulum (ER) membrane and initiates the transport of the growing peptide chain across it for processing. ER processing produces mature proteins, wherein the signal peptide is cleaved from precursor proteins, typically by a ER-resident signal peptidase of the host cell, or they remain uncleaved and function as a membrane anchor. A signal peptide may also facilitate the targeting of the protein to the cell membrane. The signal peptide, however, is not responsible for the final destination of the mature protein. Secretory proteins devoid of additional address tags in their sequence are by default secreted to the external environment. During recent years, a more advanced view of signal peptides has evolved, showing that the functions and immunodominance of certain signal peptides are much more versatile than previously anticipated.

[0754] Tropical disease vaccines of the present disclosure may comprise, for example, RNA (e.g., mRNA) polynucleotides encoding an artificial signal peptide, wherein the signal peptide coding sequence is operably linked to and is in frame with the coding sequence of the antigenic polypeptide. Thus, tropical disease vaccines of the present disclosure, in some embodiments, produce an antigenic polypeptide (e.g., a Malaria (e.g., P. falciparum, P. vivax, P. malariae and/or P. ovale), JEV, WNV, EEEV, VEEV, SINV, CHIKV, DENV, ZIKV and/or YFV antigenic polypeptide) fused to a signal peptide. In some embodiments, a signal peptide is fused to the N-terminus of the antigenic polypeptide. In some embodiments, a signal peptide is fused to the C-terminus of the antigenic polypeptide.

[0755] In some embodiments, the signal peptide fused to the antigenic polypeptide is an artificial signal peptide. In some embodiments, an artificial signal peptide fused to the antigenic polypeptide encoded by the RNA (e.g., mRNA) vaccine is obtained from an immunoglobulin protein, e.g., an IgE signal peptide or an IgG signal peptide. In some embodiments, a signal peptide fused to the antigenic polypeptide encoded by a RNA (e.g., mRNA) vaccine is an Ig heavy chain epsilon-1 signal peptide (IgE HC SP) having the sequence of: MDWTWILFLVAAATRVHS; SEQ ID NO: 424. In some embodiments, a signal peptide fused to the antigenic polypeptide encoded by the (e.g., mRNA) RNA (e.g., mRNA) vaccine is an IgGk chain V-III region HAH signal peptide (IgGk SP) having the sequence of METPAQLLFLLLLWLPDTTG; SEQ ID NO: 423. In some embodiments, the signal peptide is selected from: Japanese encephalitis PRM signal sequence (MLGSNSGQRVVFTILLLLVAPAYS; SEQ ID NO: 425), VSINVg protein signal sequence (MKCLLYLAFLFIGVNCA; SEQ ID NO: 426) and Japanese encephalitis JEV signal sequence (MWLVSLAIVTACAGA; SEQ ID NO: 427).

[0756] In some embodiments, the antigenic polypeptide encoded by a RNA (e.g., mRNA) vaccine comprises an amino acid sequence identified by any one of SEQ ID NO: 13-17, 22-29, 44-47, 52-54, 59-64, 97-117, 156-222, 469, 259-291 or 402-413 fused to a signal peptide identified by any one of SEQ ID NO: 423-427. The examples disclosed herein are not meant to be limiting and any signal peptide that is known in the art to facilitate targeting of a protein to ER for processing and/or targeting of a protein to the cell membrane may be used in accordance with the present disclosure.

[0757] A signal peptide may have a length of 15-60 amino acids. For example, a signal peptide may have a length of 15, 16, 17, 18, 19, 20, 21, 22, 23, 24, 25, 26, 27, 28, 29, 30, 31, 32, 33, 34, 35, 36, 37, 38, 39, 40, 41, 42, 43, 44, 45, 46, 47, 48, 49, 50, 51, 52, 53, 54, 55, 56, 57, 58, 59, or 60 amino acids. In some embodiments, a signal peptide has a length of 20-60, 25-60, 30-60, 35-60, 40-60, 45-60, 50-60, 55-60, 15-55, 20-55, 25-55, 30-55, 35-55, 40-55, 45-55, 50-55, 15-50, 20-50, 25-50, 30-50, 35-50, 40-50, 45-50, 15-45, 20-45, 25-45, 30-45, 35-45, 40-45, 15-40, 20-40, 25-40, 30-40, 35-40, 15-35, 20-35, 25-35, 30-35, 15-30, 20-30, 25-30, 15-25, 20-25, or 15-20 amino acids.

[0758] A signal peptide is typically cleaved from the nascent polypeptide at the cleavage junction during ER processing. The mature antigenic polypeptide produce by a tropical disease RNA (e.g., mRNA) vaccine of the present disclosure typically does not comprise a signal peptide.

### Chemical Modifications

[0759] Tropical disease vaccines of the present disclosure, in some embodiments, comprise at least RNA (e.g. mRNA) polynucleotide having an open reading frame encoding at least one antigenic polypeptide that comprises at least one chemical modification.

[0760] The terms “chemical modification” and “chemically modified” refer to modification with respect to adenosine (A), guanosine (G), uridine (U), thymidine (T) or cytidine (C) ribonucleosides or deoxyribnucleosides in at least one of their position, pattern, percent or population. Generally, these terms do not refer to the ribonucleotide modifications in naturally occurring 5′-terminal mRNA cap moieties. With respect to a polypeptide, the term “modification” refers to a modification relative to the canonical set 20 amino acids. Polypeptides, as provided herein, are also considered “modified” of they contain amino acid substitutions, insertions or a combination of substitutions and insertions.

[0761] Polynucleotides (e.g., RNA polynucleotides, such as mRNA polynucleotides), in some embodiments, comprise various (more than one) different modifications. In some embodiments, a particular region of a polynucleotide contains one, two or more (optionally different) nucleoside or nucleotide modifications. In some embodiments, a modified RNA polynucleotide (e.g., a modified mRNA polynucleotide), introduced to a cell or organism, exhibits reduced degradation in the cell or organism, respectively, relative to an unmodified polynucleotide. In some embodiments, a modified RNA polynucleotide (e.g., a modified mRNA polynucleotide), introduced into a cell or organism, may exhibit reduced immunogenicity in the cell or organism, respectively (e.g., a reduced innate response).

[0762] Modifications of polynucleotides include, without limitation, those described herein. Polynucleotides (e.g., RNA polynucleotides, such as mRNA polynucleotides) may comprise modifications that are naturally-occurring, non-naturally-occurring or the polynucleotide may comprise a combination of naturally-occurring and non-naturally-occurring modifications. Polynucleotides may include any useful modification, for example, of a sugar, a nucleobase, or an internucleoside linkage (e.g., to a linking phosphate, to a phosphodiester linkage or to the phosphodiester backbone).

[0763] Polynucleotides (e.g., RNA polynucleotides, such as mRNA polynucleotides), in some embodiments, comprise non-natural modified nucleotides that are introduced during synthesis or post-synthesis of the polynucleotides to achieve desired functions or properties. The modifications may be present on an internucleotide linkages, purine or pyrimidine bases, or sugars. The modification may be introduced with chemical synthesis or with a polymerase enzyme at the terminal of a chain or anywhere else in the chain. Any of the regions of a polynucleotide may be chemically modified.

[0764] The present disclosure provides for modified nucleosides and nucleotides of a polynucleotide (e.g., RNA polynucleotides, such as mRNA polynucleotides). A “nucleoside” refers to a compound containing a sugar molecule (e.g., a pentose or ribose) or a derivative thereof in combination with an organic base (e.g., a purine or pyrimidine) or a derivative thereof (also referred to herein as “nucleobase”). A “nucleotide” refers to a nucleoside, including a phosphate group. Modified nucleotides may by synthesized by any useful method, such as, for example, chemically, enzymatically, or recombinantly, to include one or more modified or non-natural nucleosides. Polynucleotides may comprise a region or regions of linked nucleosides. Such regions may have variable backbone linkages. The linkages may be standard phosphodiester linkages, in which case the polynucleotides would comprise regions of nucleotides.

[0765] Modified nucleotide base pairing encompasses not only the standard adenosine-thymine, adenosine-uracil, or guanosine-cytosine base pairs, but also base pairs formed between nucleotides and/or modified nucleotides comprising non-standard or modified bases, wherein the arrangement of hydrogen bond donors and hydrogen bond acceptors permits hydrogen bonding between a non-standard base and a standard base or between two complementary non-standard base structures. One example of such non-standard base pairing is the base pairing between the modified nucleotide inosine and adenine, cytosine or uracil. Any combination of base/sugar or linker may be incorporated into polynucleotides of the present disclosure.

[0766] Modifications of polynucleotides (e.g., RNA polynucleotides, such as mRNA polynucleotides) that are useful in the vaccines of the present disclosure include, but are not limited to the following: 2-methylthio-N6-(cis-hydroxyisopentenyl) adenosine; 2-methylthio-N6-methyladenosine; 2-methylthio-N6-threonyl carbamoyladenosine; N6-glycinylcarbamoyladenosine; N6-isopentenyladenosine; N6-methyladenosine; N6-thrconylcarbamoyladenosine; 1,2′-O-dimethyladenosine; 1-methyladenosine; 2′-O-methyladenosine; 2′-O-ribosyladenosine (phosphate); 2-methyladenosine; 2-methylthio-N6 isopentenyladenosine; 2-methylthio-N6-hydroxynorvalyl carbamoyladenosine; 2′-O-methyladenosine; 2′-O-ribosyladenosine (phosphate); Isopentenyladenosine; N6-(cis-hydroxyisopentenyl) adenosine; N6,2′-O-dimethyladenosine; N6,2′-O-dimethyladenosine; N6,N6,2′-O-trimethyladenosine; N6,N6-dimethyladenosine; N6-acetyladenosine; N6-hydroxynorvalylcarbamoyladenosine; N6-methyl-N6-thrconylcarbamoyladenosine; 2-methyladenosine; 2-methylthio-N6-isopentenyladenosine; 7-deaza-adenosine; N1-methyl-adenosine; N6,N6 (dimethyl) adenine; N6-cis-hydroxy-isopentenyl-adenosine; α-thio-adenosine; 2 (amino) adenine; 2 (aminopropyl) adenine; 2 (methylthio) N6 (isopentenyl) adenine; 2-(alkyl) adenine; 2-(aminoalkyl) adenine; 2-(aminopropyl) adenine; 2-(halo) adenine; 2-(halo) adenine; 2-(propyl) adenine; 2′-Amino-2′-deoxy-ATP; 2′-Azido-2′-deoxy-ATP; 2′-Deoxy-2′-a-aminoadenosine TP; 2′-Deoxy-2′-a-azidoadenosine TP; 6 (alkyl) adenine; 6 (methyl) adenine; 6-(alkyl) adenine; 6-(methyl) adenine; 7 (deaza) adenine; 8 (alkenyl) adenine; 8 (alkynyl) adenine; 8 (amino) adenine; 8 (thioalkyl) adenine; 8-(alkenyl) adenine; 8-(alkyl) adenine; 8-(alkynyl) adenine; 8-(amino) adenine; 8-(halo) adenine; 8-(hydroxyl) adenine; 8-(thioalkyl) adenine; 8-(thiol) adenine; 8-azido-adenosine; aza adenine; deaza adenine; N6 (methyl) adenine; N6-(isopentyl) adenine; 7-deaza-8-aza-adenosine; 7-methyladenine; 1-Deazaadenosine TP; 2′Fluoro-N6-Bz-deoxyadenosine TP; 2′-OMe-2-Amino-ATP; 2′O-methyl-N6-Bz-deoxyadenosine TP; 2′-a-Ethynyladenosine TP; 2-aminoadenine; 2-Aminoadenosine TP; 2-Amino-ATP; 2′-a-Trifluoromethyladenosine TP; 2-Azidoadenosine TP; 2′-b-Ethynyladenosine TP; 2-Bromoadenosine TP; 2′-b-Trifluoromethyladenosine TP; 2-Chloroadenosine TP; 2′-Deoxy-2′,2′-difluoroadenosine TP; 2′-Deoxy-2′-a-mercaptoadenosine TP; 2′-Deoxy-2′-a-thiomethoxyadenosine TP; 2′-Deoxy-2′-b-aminoadenosine TP; 2′-Deoxy-2′-b-azidoadenosine TP; 2′-Deoxy-2′-b-bromoadenosine TP; 2′-Deoxy-2′-b-chloroadenosine TP; 2′-Deoxy-2′-b-fluoroadenosine TP; 2′-Deoxy-2′-b-iodoadenosine TP; 2′-Deoxy-2′-b-mercaptoadenosine TP; 2′-Deoxy-2′-b-thiomethoxyadenosine TP; 2-Fluoroadenosine TP; 2-Iodoadenosine TP; 2-Mercaptoadenosine TP; 2-methoxy-adenine; 2-methylthio-adenine; 2-Trifluoromethyladenosine TP; 3-Deaza-3-bromoadenosine TP; 3-Deaza-3-chloroadenosine TP; 3-Deaza-3-fluoroadenosine TP; 3-Deaza-3-iodoadenosine TP; 3-Deazaadenosine TP; 4′-Azidoadenosine TP; 4′-Carbocyclic adenosine TP; 4′-Ethynyladenosine TP; 5′-Homo-adenosine TP; 8-Aza-ATP; 8-bromo-adenosine TP; 8-Trifluoromethyladenosine TP; 9-Deazaadenosine TP; 2-aminopurine; 7-deaza-2,6-diaminopurine; 7-deaza-8-aza-2,6-diaminopurine; 7-deaza-8-aza-2-aminopurine; 2,6-diaminopurine; 7-deaza-8-aza-adenine, 7-deaza-2-aminopurine; 2-thiocytidine; 3-methylcytidine; 5-formylcytidine; 5-hydroxymethylcytidine; 5-methylcytidine; N4-acetylcytidine; 2′-O-methylcytidine; 2′-O-methylcytidine; 5,2′-O-dimethylcytidine; 5-formyl-2′-O-methylcytidine; Lysidine; N4,2′-O-dimethylcytidine; N4-acetyl-2′-O-methylcytidine; N4-methylcytidine; N4,N4-Dimethyl-2′-OMe-Cytidine TP; 4-methylcytidine; 5-aza-cytidine; Pseudo-iso-cytidine; pyrrolo-cytidine; α-thio-cytidine; 2-(thio) cytosine; 2′-Amino-2′-deoxy-CTP; 2′-Azido-2′-deoxy-CTP; 2′-Deoxy-2′-a-aminocytidine TP; 2′-Deoxy-2′-a-azidocytidine TP; 3 (deaza) 5 (aza) cytosine; 3 (methyl) cytosine; 3-(alkyl) cytosine; 3-(deaza) 5 (aza) cytosine; 3-(methyl) cytidine; 4,2′-O-dimethylcytidine; 5 (halo) cytosine; 5 (methyl) cytosine; 5 (propynyl) cytosine; 5 (trifluoromethyl) cytosine; 5-(alkyl) cytosine; 5-(alkynyl) cytosine; 5-(halo) cytosine; 5-(propynyl) cytosine; 5-(trifluoromethyl) cytosine; 5-bromo-cytidine; 5-iodo-cytidine; 5-propynyl cytosine; 6-(azo) cytosine; 6-aza-cytidine; aza cytosine; deaza cytosine; N4 (acetyl) cytosine; 1-methyl-1-deaza-pseudoisocytidine; 1-methyl-pseudoisocytidine; 2-methoxy-5-methyl-cytidine; 2-methoxy-cytidine; 2-thio-5-methyl-cytidine; 4-methoxy-1-methyl-pseudoisocytidine; 4-methoxy-pseudoisocytidine; 4-thio-1-methyl-1-deaza-pseudoisocytidine; 4-thio-1-methyl-pseudoisocytidine; 4-thio-pseudoisocytidine; 5-aza-zebularine; 5-methyl-zebularine; pyrrolo-pseudoisocytidine; Zebularine; (E)-5-(2-Bromo-vinyl) cytidine TP; 2,2′-anhydro-cytidine TP hydrochloride; 2′Fluor-N4-Bz-cytidine TP; 2′Fluoro-N4-Acetyl-cytidine TP; 2′-O-Methyl-N4-Acetyl-cytidine TP; 2′O-methyl-N4-Bz-cytidine TP; 2′-a-Ethynylcytidine TP; 2′-a-Trifluoromethylcytidine TP; 2′-b-Ethynylcytidine TP; 2′-b-Trifluoromethylcytidine TP; 2′-Deoxy-2′,2′-difluorocytidine TP; 2′-Deoxy-2′-a-mercaptocytidine TP; 2′-Deoxy-2′-a-thiomethoxycytidine TP; 2′-Deoxy-2′-b-aminocytidine TP; 2′-Deoxy-2′-b-azidocytidine TP; 2′-Deoxy-2′-b-bromocytidine TP; 2′-Deoxy-2′-b-chlorocytidine TP; 2′-Deoxy-2′-b-fluorocytidine TP; 2′-Deoxy-2′-b-iodocytidine TP; 2′-Deoxy-2′-b-mercaptocytidine TP; 2′-Deoxy-2′-b-thiomethoxycytidine TP; 2′-O-Methyl-5-(1-propynyl) cytidine TP; 3′-Ethynylcytidine TP; 4′-Azidocytidine TP; 4′-Carbocyclic cytidine TP; 4′-Ethynylcytidine TP; 5-(1-Propynyl) ara-cytidine TP; 5-(2-Chloro-phenyl)-2-thiocytidine TP; 5-(4-Amino-phenyl)-2-thiocytidine TP; 5-Aminoallyl-CTP; 5-Cyanocytidine TP; 5-Ethynylara-cytidine TP; 5-Ethynylcytidine TP; 5′-Homo-cytidine TP; 5-Methoxycytidine TP; 5-Trifluoromethyl-Cytidine TP; N4-Amino-cytidine TP; N4-Benzoyl-cytidine TP; Pseudoisocytidine; 7-methylguanosine; N2,2′-O-dimethylguanosine; N2-methylguanosine; Wyosine; 1,2′-O-dimethylguanosine; 1-methylguanosine; 2′-O-methylguanosine; 2′-O-ribosylguanosine (phosphate); 2′-O-methylguanosine; 2′-O-ribosylguanosine (phosphate); 7-aminomethyl-7-deazaguanosine; 7-cyano-7-deazaguanosine; Archaeosine; Methylwyosine; N2,7-dimethylguanosine; N2,N2,2′-O-trimethylguanosine; N2,N2,7-trimethylguanosine; N2,N2-dimethylguanosine; N2,7,2′-O-trimethylguanosine; 6-thio-guanosine; 7-deaza-guanosine; 8-oxo-guanosine; N1-methyl-guanosine; a-thio-guanosine; 2 (propyl) guanine; 2-(alkyl) guanine; 2′-Amino-2′-deoxy-GTP; 2′-Azido-2′-deoxy-GTP; 2′-Deoxy-2′-a-aminoguanosine TP; 2′-Deoxy-2′-a-azidoguanosine TP; 6 (methyl) guanine; 6-(alkyl) guanine; 6-(methyl) guanine; 6-methyl-guanosine; 7 (alkyl) guanine; 7 (deaza) guanine; 7 (methyl) guanine; 7-(alkyl) guanine; 7-(deaza) guanine; 7-(methyl) guanine; 8 (alkyl) guanine; 8 (alkynyl) guanine; 8 (halo) guanine; 8 (thioalkyl) guanine; 8-(alkenyl) guanine; 8-(alkyl) guanine; 8-(alkynyl) guanine; 8-(amino) guanine; 8-(halo) guanine; 8-(hydroxyl) guanine; 8-(thioalkyl) guanine; 8-(thiol) guanine; aza guanine; deaza guanine; N (methyl) guanine; N-(methyl) guanine; 1-methyl-6-thio-guanosine; 6-methoxy-guanosine; 6-thio-7-deaza-8-aza-guanosine; 6-thio-7-deaza-guanosine; 6-thio-7-methyl-guanosine; 7-deaza-8-aza-guanosine; 7-methyl-8-oxo-guanosine; N2,N2-dimethyl-6-thio-guanosine; N2-methyl-6-thio-guanosine; 1-Me-GTP; 2′Fluoro-N2-isobutyl-guanosine TP; 2′O-methyl-N2-isobutyl-guanosine TP; 2′-a-Ethynylguanosine TP; 2′-a-Trifluoromethylguanosine TP; 2′-b-Ethynylguanosine TP; 2′-b-Trifluoromethylguanosine TP; 2′-Deoxy-2′,2′-difluoroguanosine TP; 2′-Deoxy-2′-a-mercaptoguanosine TP; 2′-Deoxy-2′-a-thiomethoxyguanosine TP; 2′-Deoxy-2′-b-aminoguanosine TP; 2′-Deoxy-2′-b-azidoguanosine TP; 2′-Deoxy-2′-b-bromoguanosine TP; 2′-Deoxy-2′-b-chloroguanosine TP; 2′-Deoxy-2′-b-fluoroguanosine TP; 2′-Deoxy-2′-b-iodoguanosine TP; 2′-Deoxy-2′-b-mercaptoguanosine TP; 2′-Deoxy-2′-b-thiomethoxyguanosine TP; 4′-Azidoguanosine TP; 4′-Carbocyclic guanosine TP; 4′-Ethynylguanosine TP; 5′-Homo-guanosine TP; 8-bromo-guanosine TP; 9-Deazaguanosine TP; N2-isobutyl-guanosine TP; 1-methylinosine; Inosine; 1,2′-O-dimethylinosine; 2′-O-methylinosine; 7-methylinosine; 2′-O-methylinosine; Epoxyqueuosine; galactosyl-queuosine; Mannosylqueuosine; Queuosine; allyamino-thymidine; aza thymidine; deaza thymidine; deoxy-thymidine; 2′-O-methyluridine; 2-thiouridine; 3-methyluridine; 5-carboxymethyluridine; 5-hydroxyuridine; 5-methyluridine; 5-taurinomethyl-2-thiouridine; 5-taurinomethyluridine; Dihydrouridine; Pseudouridine; (3-(3-amino-3-carboxypropyl) uridine; 1-methyl-3-(3-amino-5-carboxypropyl) pseudouridine; 1-methylpseduouridine; 1-methyl-pseudouridine; 2′-O-methyluridine; 2′-O-methylpseudouridine; 2′-O-methyluridine; 2-thio-2′-O-methyluridine; 3-(3-amino-3-carboxypropyl) uridine; 3,2′-O-dimethyluridine; 3-Methyl-pseudo-Uridine TP; 4-thiouridine; 5-(carboxyhydroxymethyl) uridine; 5-(carboxyhydroxymethyl) uridine methyl ester; 5,2′-O-dimethyluridine; 5,6-dihydro-uridine; 5-aminomethyl-2-thiouridine; 5-carbamoylmethyl-2′-O-methyluridine; 5-carbamoylmethyluridine; 5-carboxyhydroxymethyluridine; 5-carboxyhydroxymethyluridine methyl ester; 5-carboxymethylaminomethyl-2′-O-methyluridine; 5-carboxymethylaminomethyl-2-thiouridine; 5-carboxymethylaminomethyl-2-thiouridine; 5-carboxymethylaminomethyluridine; 5-carboxymethylaminomethyluridine; 5-Carbamoylmethyluridine TP; 5-methoxycarbonylmethyl-2′-O-methyluridine; 5-methoxycarbonylmethyl-2-thiouridine; 5-methoxycarbonylmethyluridine; 5-methoxyuridine; 5-methyl-2-thiouridine; 5-methylaminomethyl-2-selenouridine; 5-methylaminomethyl-2-thiouridine; 5-methylaminomethyluridine; 5-Methyldihydrouridine; 5-Oxyacetic acid-Uridine TP; 5-Oxyacetic acid-methyl ester-Uridine TP; N1-methyl-pseudo-uridine; uridine 5-oxyacetic acid; uridine 5-oxyacetic acid methyl ester; 3-(3-Amino-3-carboxypropyl)-Uridine TP; 5-(iso-Pentenylaminomethyl)-2-thiouridine TP; 5-(iso-Pentenylaminomethyl)-2′-O-methyluridine TP; 5-(iso-Pentenylaminomethyl) uridine TP; 5-propynyl uracil; a-thio-uridine; 1 (aminoalkylamino-carbonylethylenyl)-2 (thio)-pseudouracil; 1 (aminoalkylaminocarbonylethylenyl)-2,4-(dithio) pseudouracil; 1 (aminoalkylaminocarbonylethylenyl)-4 (thio) pseudouracil; 1 (aminoalkylaminocarbonylethylenyl)-pseudouracil; 1 (aminocarbonylethylenyl)-2 (thio)-pseudouracil; 1 (aminocarbonylethylenyl)-2,4-(dithio) pseudouracil; 1 (aminocarbonylethylenyl)-4 (thio) pseudouracil; 1 (aminocarbonylethylenyl)-pseudouracil; 1 substituted 2 (thio)-pseudouracil; 1 substituted 2,4-(dithio) pseudouracil; 1 substituted 4 (thio) pseudouracil; 1 substituted pseudouracil; 1-(aminoalkylamino-carbonylethylenyl)-2-(thio)-pseudouracil; 1-Methyl-3-(3-amino-3-carboxypropyl) pseudouridine TP; 1-Methyl-3-(3-amino-3-carboxypropyl) pseudo-UTP; 1-Methyl-pseudo-UTP; 2 (thio) pseudouracil; 2′ deoxy uridine; 2′ fluorouridine; 2-(thio) uracil; 2,4-(dithio) psuedouracil; 2′ methyl, 2′amino, 2′azido, 2′fluro-guanosine; 2′-Amino-2′-deoxy-UTP; 2′-Azido-2′-deoxy-UTP; 2′-Azido-deoxyuridine TP; 2′-O-methylpseudouridine; 2′ deoxy uridine; 2′ fluorouridine; 2′-Deoxy-2′-a-aminouridine TP; 2′-Deoxy-2′-a-azidouridine TP; 2-methylpseudouridine; 3 (3 amino-3 carboxypropyl) uracil; 4 (thio) pseudouracil; 4-(thio) pseudouracil; 4-(thio) uracil; 4-thiouracil; 5 (1,3-diazole-1-alkyl) uracil; 5 (2-aminopropyl) uracil; 5 (aminoalkyl) uracil; 5 (dimethylaminoalkyl) uracil; 5 (guanidiniumalkyl) uracil; 5 (methoxycarbonylmethyl)-2-(thio) uracil; 5 (methoxycarbonyl-methyl) uracil; 5 (methyl) 2 (thio) uracil; 5 (methyl) 2,4 (dithio) uracil; 5 (methyl) 4 (thio) uracil; 5 (methylaminomethyl)-2 (thio) uracil; 5 (methylaminomethyl)-2,4 (dithio) uracil; 5 (methylaminomethyl)-4 (thio) uracil; 5 (propynyl) uracil; 5 (trifluoromethyl) uracil; 5-(2-aminopropyl) uracil; 5-(alkyl)-2-(thio) pseudouracil; 5-(alkyl)-2,4 (dithio) pseudouracil; 5-(alkyl)-4 (thio) pseudouracil; 5-(alkyl) pseudouracil; 5-(alkyl) uracil; 5-(alkynyl) uracil; 5-(allylamino) uracil; 5-(cyanoalkyl) uracil; 5-(dialkylaminoalkyl) uracil; 5-(dimethylaminoalkyl) uracil; 5-(guanidiniumalkyl) uracil; 5-(halo) uracil; 5-(1,3-diazole-1-alkyl) uracil; 5-(methoxy) uracil; 5-(methoxycarbonylmethyl)-2-(thio) uracil; 5-(methoxycarbonyl-methyl) uracil; 5-(methyl) 2 (thio) uracil; 5-(methyl) 2,4 (dithio) uracil; 5-(methyl) 4 (thio) uracil; 5-(methyl)-2-(thio) pseudouracil; 5-(methyl)-2,4 (dithio) pseudouracil; 5-(methyl)-4 (thio) pseudouracil; 5-(methyl) pseudouracil; 5-(methylaminomethyl)-2 (thio) uracil; 5-(methylaminomethyl)-2,4 (dithio) uracil; 5-(methylaminomethyl)-4-(thio) uracil; 5-(propynyl) uracil; 5-(trifluoromethyl) uracil; 5-aminoallyl-uridine; 5-bromo-uridine; 5-iodo-uridine; 5-uracil; 6 (azo) uracil; 6-(azo) uracil; 6-aza-uridine; allyamino-uracil; aza uracil; deaza uracil; N3 (methyl) uracil; Pseudo-UTP-1-2-ethanoic acid; Pseudouracil; 4-Thio-pseudo-UTP; 1-carboxymethyl-pseudouridine; 1-methyl-1-deaza-pseudouridine; 1-propynyl-uridine; 1-taurinomethyl-1-methyl-uridine; 1-taurinomethyl-4-thio-uridine; 1-taurinomethyl-pseudouridine; 2-methoxy-4-thio-pseudouridine; 2-thio-1-methyl-1-deaza-pseudouridine; 2-thio-1-methyl-pseudouridine; 2-thio-5-aza-uridine; 2-thio-dihydropseudouridine; 2-thio-dihydrouridine; 2-thio-pseudouridine; 4-methoxy-2-thio-pseudouridine; 4-methoxy-pseudouridine; 4-thio-1-methyl-pseudouridine; 4-thio-pseudouridine; 5-aza-uridine; Dihydropseudouridine; (±) 1-(2-Hydroxypropyl) pseudouridine TP; (2R)-1-(2-Hydroxypropyl) pseudouridine TP; (2S)-1-(2-Hydroxypropyl) pseudouridine TP; (E)-5-(2-Bromo-vinyl) ara-uridine TP; (E)-5-(2-Bromo-vinyl) uridine TP; (Z)-5-(2-Bromo-vinyl) ara-uridine TP; (Z)-5-(2-Bromo-vinyl) uridine TP; 1-(2,2,2-Trifluoroethyl)-pseudo-UTP; 1-(2,2,3,3,3-Pentafluoropropyl) pseudouridine TP; 1-(2,2-Diethoxyethyl) pseudouridine TP; 1-(2,4,6-Trimethylbenzyl) pseudouridine TP; 1-(2,4,6-Trimethyl-benzyl) pseudo-UTP; 1-(2,4,6-Trimethyl-phenyl) pseudo-UTP; 1-(2-Amino-2-carboxyethyl) pseudo-UTP; 1-(2-Amino-ethyl) pseudo-UTP; 1-(2-Hydroxyethyl) pseudouridine TP; 1-(2-Methoxyethyl) pseudouridine TP; 1-(3,4-Bis-trifluoromethoxybenzyl) pseudouridine TP; 1-(3,4-Dimethoxybenzyl) pseudouridine TP; 1-(3-Amino-3-carboxypropyl) pseudo-UTP; 1-(3-Amino-propyl) pseudo-UTP; 1-(3-Cyclopropyl-prop-2-ynyl) pseudouridine TP; 1-(4-Amino-4-carboxybutyl) pseudo-UTP; 1-(4-Amino-benzyl) pseudo-UTP; 1-(4-Amino-butyl) pseudo-UTP; 1-(4-Amino-phenyl) pseudo-UTP; 1-(4-Azidobenzyl) pseudouridine TP; 1-(4-Bromobenzyl) pseudouridine TP; 1-(4-Chlorobenzyl) pseudouridine TP; 1-(4-Fluorobenzyl) pseudouridine TP; 1-(4-Iodobenzyl) pseudouridine TP; 1-(4-Methanesulfonylbenzyl) pseudouridine TP; 1-(4-Methoxybenzyl) pseudouridine TP; 1-(4-Methoxy-benzyl) pseudo-UTP; 1-(4-Methoxy-phenyl) pseudo-UTP; 1-(4-Methylbenzyl) pseudouridine TP; 1-(4-Methyl-benzyl) pseudo-UTP; 1-(4-Nitrobenzyl) pseudouridine TP; 1-(4-Nitro-benzyl) pseudo-UTP; 1 (4-Nitro-phenyl) pseudo-UTP; 1-(4-Thiomethoxybenzyl) pseudouridine TP; 1-(4-Trifluoromethoxybenzyl) pseudouridine TP; 1-(4-Trifluoromethylbenzyl) pseudouridine TP; 1-(5-Amino-pentyl) pseudo-UTP; 1-(6-Amino-hexyl) pseudo-UTP; 1,6-Dimethyl-pseudo-UTP; 1-[3-(2-{2-[2-(2-Aminoethoxy)-ethoxy]-ethoxy}-ethoxy)-propionyl]pseudouridine TP; 1-{3-[2-(2-Aminoethoxy)-ethoxy]-propionyl}pseudouridine TP; 1-Acetylpseudouridine TP; 1-Alkyl-6-(1-propynyl)-pseudo-UTP; 1-Alkyl-6-(2-propynyl)-pseudo-UTP; 1-Alkyl-6-allyl-pseudo-UTP; 1-Alkyl-6-ethynyl-pseudo-UTP; 1-Alkyl-6-homoallyl-pseudo-UTP; 1-Alkyl-6-vinyl-pseudo-UTP; 1-Allylpseudouridine TP; 1-Aminomethyl-pseudo-UTP; 1-Benzoylpseudouridine TP; 1-Benzyloxymethylpseudouridine TP; 1-Benzyl-pseudo-UTP; 1-Biotinyl-PEG2-pseudouridine TP; 1-Biotinylpseudouridine TP; 1-Butyl-pseudo-UTP; 1-Cyanomethylpseudouridine TP; 1-Cyclobutylmethyl-pseudo-UTP; 1-Cyclobutyl-pseudo-UTP; 1-Cycloheptylmethyl-pseudo-UTP; 1-Cycloheptyl-pseudo-UTP; 1-Cyclohexylmethyl-pseudo-UTP; 1-Cyclohexyl-pseudo-UTP; 1-Cyclooctylmethyl-pseudo-UTP; 1-Cyclooctyl-pseudo-UTP; 1-Cyclopentylmethyl-pseudo-UTP; 1-Cyclopentyl-pseudo-UTP; 1-Cyclopropylmethyl-pseudo-UTP; 1-Cyclopropyl-pseudo-UTP; 1-Ethyl-pseudo-UTP; 1-Hexyl-pseudo-UTP; 1-Homoallylpseudouridine TP; 1-Hydroxymethylpseudouridine TP; 1-iso-propyl-pseudo-UTP; 1-Me-2-thio-pseudo-UTP; 1-Me-4-thio-pseudo-UTP; 1-Me-alpha-thio-pseudo-UTP; 1-Methanesulfonylmethylpseudouridine TP; 1-Methoxymethylpseudouridine TP; 1-Methyl-6-(2,2,2-Trifluoroethyl) pseudo-UTP; 1-Methyl-6-(4-morpholino)-pseudo-UTP; 1-Methyl-6-(4-thiomorpholino)-pseudo-UTP; 1-Methyl-6-(substituted phenyl) pseudo-UTP; 1-Methyl-6-amino-pseudo-UTP; 1-Methyl-6-azido-pseudo-UTP; 1-Methyl-6-bromo-pseudo-UTP; 1-Methyl-6-butyl-pseudo-UTP; 1-Methyl-6-chloro-pseudo-UTP; 1-Methyl-6-cyano-pseudo-UTP; 1-Methyl-6-dimethylamino-pseudo-UTP; 1-Methyl-6-ethoxy-pseudo-UTP; 1-Methyl-6-ethylcarboxylate-pseudo-UTP; 1-Methyl-6-ethyl-pseudo-UTP; 1-Methyl-6-fluoro-pseudo-UTP; 1-Methyl-6-formyl-pseudo-UTP; 1-Methyl-6-hydroxyamino-pseudo-UTP; 1-Methyl-6-hydroxy-pseudo-UTP; 1-Methyl-6-iodo-pseudo-UTP; 1-Methyl-6-iso-propyl-pseudo-UTP; 1-Methyl-6-methoxy-pseudo-UTP; 1-Methyl-6-methylamino-pseudo-UTP; 1-Methyl-6-phenyl-pseudo-UTP; 1-Methyl-6-propyl-pseudo-UTP; 1-Methyl-6-tert-butyl-pseudo-UTP; 1-Methyl-6-trifluoromethoxy-pseudo-UTP; 1-Methyl-6-trifluoromethyl-pseudo-UTP; 1-Morpholinomethylpseudouridine TP; 1-Pentyl-pseudo-UTP; 1-Phenyl-pseudo-UTP; 1-Pivaloylpseudouridine TP; 1-Propargylpseudouridine TP; 1-Propyl-pseudo-UTP; 1-propynyl-pseudouridine; 1-p-tolyl-pseudo-UTP; 1-tert-Butyl-pseudo-UTP; 1-Thiomethoxymethylpseudouridine TP; 1-Thiomorpholinomethylpseudouridine TP; 1-Trifluoroacetylpseudouridine TP; 1-Trifluoromethyl-pseudo-UTP; 1-Vinylpseudouridine TP; 2,2′-anhydro-uridine TP; 2′-bromo-deoxyuridine TP; 2′-F-5-Methyl-2′-deoxy-UTP; 2′-OMe-5-Mc-UTP; 2′-OMe-pseudo-UTP; 2′-a-Ethynyluridine TP; 2′-a-Trifluoromethyluridine TP; 2′-b-Ethynyluridine TP; 2′-b-Trifluoromethyluridine TP; 2′-Deoxy-2′,2′-difluorouridine TP; 2′-Deoxy-2′-a-mercaptouridine TP; 2′-Deoxy-2′-a-thiomethoxyuridine TP; 2′-Deoxy-2′-b-aminouridine TP; 2′-Deoxy-2′-b-azidouridine TP; 2′-Deoxy-2′-b-bromouridine TP; 2′-Deoxy-2′-b-chlorouridine TP; 2′-Deoxy-2′-b-fluorouridine TP; 2′-Deoxy-2′-b-iodouridine TP; 2′-Deoxy-2′-b-mercaptouridine TP; 2′-Deoxy-2′-b-thiomethoxyuridine TP; 2-methoxy-4-thio-uridine; 2-methoxyuridine; 2′-O-Methyl-5-(1-propynyl) uridine TP; 3-Alkyl-pseudo-UTP; 4′-Azidouridine TP; 4′-Carbocyclic uridine TP; 4′-Ethynyluridine TP; 5-(1-Propynyl) ara-uridine TP; 5-(2-Furanyl) uridine TP; 5-Cyanouridine TP; 5-Dimethylaminouridine TP; 5′-Homo-uridine TP; 5-iodo-2′-fluoro-deoxyuridine TP; 5-Phenylethynyluridine TP; 5-Trideuteromethyl-6-deuterouridine TP; 5-Trifluoromethyl-Uridine TP; 5-Vinylarauridine TP; 6-(2,2,2-Trifluoroethyl)-pseudo-UTP; 6-(4-Morpholino)-pseudo-UTP; 6-(4-Thiomorpholino)-pseudo-UTP; 6-(Substituted-Phenyl)-pseudo-UTP; 6-Amino-pseudo-UTP; 6-Azido-pseudo-UTP; 6-Bromo-pseudo-UTP; 6-Butyl-pseudo-UTP; 6-Chloro-pseudo-UTP; 6-Cyano-pseudo-UTP; 6-Dimethylamino-pseudo-UTP; 6-Ethoxy-pseudo-UTP; 6-Ethylcarboxylate-pseudo-UTP; 6-Ethyl-pseudo-UTP; 6-Fluoro-pseudo-UTP; 6-Formyl-pseudo-UTP; 6-Hydroxyamino-pseudo-UTP; 6-Hydroxy-pseudo-UTP; 6-Iodo-pseudo-UTP; 6-iso-Propyl-pseudo-UTP; 6-Methoxy-pseudo-UTP; 6-Methylamino-pseudo-UTP; 6-Methyl-pseudo-UTP; 6-Phenyl-pseudo-UTP; 6-Phenyl-pseudo-UTP; 6-Propyl-pseudo-UTP; 6-tert-Butyl-pseudo-UTP; 6-Trifluoromethoxy-pseudo-UTP; 6-Trifluoromethyl-pseudo-UTP; Alpha-thio-pseudo-UTP; Pseudouridine 1-(4-methylbenzenesulfonic acid) TP; Pseudouridine 1-(4-methylbenzoic acid) TP; Pseudouridine TP 1-[3-(2-ethoxy)]propionic acid; Pseudouridine TP 1-[3-{2-(2-[2-(2-ethoxy)-ethoxy]-ethoxy)-ethoxy}]propionic acid; Pseudouridine TP 1-[3-{2-(2-[2-{2 (2-ethoxy)-ethoxy}-ethoxy]-ethoxy)-ethoxy}]propionic acid; Pseudouridine TP 1-[3-{2-(2-[2-ethoxy]-ethoxy)-ethoxy}]propionic acid; Pseudouridine TP 1-[3-{2-(2-ethoxy)-ethoxy}]propionic acid; Pseudouridine TP 1-methylphosphonic acid; Pseudouridine TP 1-methylphosphonic acid diethyl ester; Pseudo-UTP-N1-3-propionic acid; Pseudo-UTP-N1-4-butanoic acid; Pseudo-UTP-N1-5-pentanoic acid; Pseudo-UTP-N1-6-hexanoic acid; Pseudo-UTP-N1-7-heptanoic acid; Pseudo-UTP-N1-methyl-p-benzoic acid; Pseudo-UTP-N1-p-benzoic acid; Wybutosine; Hydroxywybutosine; Isowyosine; Peroxywybutosine; undermodified hydroxywybutosine; 4-demethylwyosine; 2,6-(diamino) purine; 1-(aza)-2-(thio)-3-(aza)-phenoxazin-1-yl: 1,3-(diaza)-2-(oxo)-phenthiazin-1-yl; 1,3-(diaza)-2-(oxo)-phenoxazin-1-yl; 1,3,5-(triaza)-2,6-(dioxa)-naphthalene; 2 (amino) purine; 2,4,5-(trimethyl)phenyl; 2′ methyl, 2′amino, 2′azido, 2′fluro-cytidine; 2′ methyl, 2′amino, 2′azido, 2′fluro-adenine; 2′methyl, 2′amino, 2′azido, 2′fluro-uridine; 2′-amino-2′-deoxyribose; 2-amino-6-Chloro-purine; 2-aza-inosinyl; 2′-azido-2′-deoxyribose; 2′fluoro-2′-deoxyribose; 2′-fluoro-modified bases; 2′-O-methyl-ribose; 2-oxo-7-aminopyridopyrimidin-3-yl; 2-oxo-pyridopyrimidine-3-yl; 2-pyridinone; 3 nitropyrrole; 3-(methyl)-7-(propynyl) isocarbostyrilyl; 3-(methyl) isocarbostyrilyl; 4-(fluoro)-6-(methyl)benzimidazole; 4-(methyl)benzimidazole; 4-(methyl) indolyl; 4,6-(dimethyl) indolyl; 5 nitroindole; 5 substituted pyrimidines; 5-(methyl) isocarbostyrilyl; 5-nitroindole; 6-(aza)pyrimidine; 6-(azo) thymine; 6-(methyl)-7-(aza) indolyl; 6-chloro-purine; 6-phenyl-pyrrolo-pyrimidin-2-on-3-yl; 7-(aminoalkylhydroxy)-1-(aza)-2-(thio)-3-(aza)-phenthiazin-1-yl; 7-(aminoalkylhydroxy)-1-(aza)-2-(thio)-3-(aza)-phenoxazin-1-yl; 7-(aminoalkylhydroxy)-1,3-(diaza)-2-(oxo)-phenoxazin-1-yl; 7-(aminoalkylhydroxy)-1,3-(diaza)-2-(oxo)-phenthiazin-1-yl; 7-(aminoalkylhydroxy)-1,3-(diaza)-2-(oxo)-phenoxazin-1-yl; 7-(aza) indolyl; 7-(guanidiniumalkylhydroxy)-1-(aza)-2-(thio)-3-(aza)-phenoxazinl-yl; 7-(guanidiniumalkylhydroxy)-1-(aza)-2-(thio)-3-(aza)-phenthiazin-1-yl; 7-(guanidiniumalkylhydroxy)-1-(aza)-2-(thio)-3-(aza)-phenoxazin-1-yl; 7-(guanidiniumalkylhydroxy)-1,3-(diaza)-2-(oxo)-phenoxazin-1-yl; 7-(guanidiniumalkyl-hydroxy)-1,3-(diaza)-2-(oxo)-phenthiazin-1-yl; 7-(guanidiniumalkylhydroxy)-1,3-(diaza)-2-(oxo)-phenoxazin-1-yl; 7-(propynyl) isocarbostyrilyl; 7-(propynyl) isocarbostyrilyl, propynyl-7-(aza) indolyl; 7-deaza-inosinyl; 7-substituted 1-(aza)-2-(thio)-3-(aza)-phenoxazin-1-yl; 7-substituted 1,3-(diaza)-2-(oxo)-phenoxazin-1-yl; 9-(methyl)-imidizopyridinyl; Aminoindolyl; Anthracenyl; bis-ortho-(aminoalkylhydroxy)-6-phenyl-pyrrolo-pyrimidin-2-on-3-yl; bis-ortho-substituted-6-phenyl-pyrrolo-pyrimidin-2-on-3-yl; Difluorotolyl; Hypoxanthine; Imidizopyridinyl; Inosinyl; Isocarbostyrilyl; Isoguanisine; N2-substituted purines; N6-methyl-2-amino-purine; N6-substituted purines; N-alkylated derivative; Napthalenyl; Nitrobenzimidazolyl; Nitroimidazolyl; Nitroindazolyl; Nitropyrazolyl; Nubularine; 06-substituted purines; O-alkylated derivative; ortho-(aminoalkylhydroxy)-6-phenyl-pyrrolo-pyrimidin-2-on-3-yl; ortho-substituted-6-phenyl-pyrrolo-pyrimidin-2-on-3-yl; Oxoformycin TP; para-(aminoalkylhydroxy)-6-phenyl-pyrrolo-pyrimidin-2-on-3-yl; para-substituted-6-phenyl-pyrrolo-pyrimidin-2-on-3-yl; Pentacenyl; Phenanthracenyl; Phenyl; propynyl-7-(aza) indolyl; Pyrenyl; pyridopyrimidin-3-yl; pyridopyrimidin-3-yl, 2-oxo-7-amino-pyridopyrimidin-3-yl; pyrrolo-pyrimidin-2-on-3-yl; Pyrrolopyrimidinyl; Pyrrolopyrizinyl; Stilbenzyl; substituted 1,2,4-triazoles; Tetracenyl; Tubercidine; Xanthine; Xanthosine-5′-TP; 2-thio-zebularine; 5-aza-2-thio-zebularine; 7-deaza-2-amino-purine; pyridin-4-one ribonucleoside; 2-Amino-riboside-TP; Formycin A TP; Formycin B TP; Pyrrolosine TP; 2′-OH-ara-adenosine TP; 2′-OH-ara-cytidine TP; 2′-OH-ara-uridine TP; 2′-OH-ara-guanosine TP; 5-(2-carbomethoxyvinyl) uridine TP; and N6-(19-Amino-pentaoxanonadecyl) adenosine TP.

[0767] In some embodiments, polynucleotides (e.g., RNA polynucleotides, such as mRNA polynucleotides) include a combination of at least two (e.g., 2, 3, 4 or more) of the aforementioned modified nucleobases.

[0768] In some embodiments, modified nucleobases in polynucleotides (e.g., RNA polynucleotides, such as mRNA polynucleotides) are selected from the group consisting of pseudouridine (ψ), N1-methylpseudouridine (m¹ψ), N1-ethylpseudouridine, 2-thiouridine, 4′-thiouridine, 5-methylcytosine, 2-thio-1-methyl-1-deaza-pseudouridine, 2-thio-1-methyl-pseudouridine, 2-thio-5-aza-uridine, 2-thio-dihydropseudouridine, 2-thio-dihydrouridine, 2-thio-pseudouridine, 4-methoxy-2-thio-pseudouridine, 4-methoxy-pseudouridine, 4-thio-1-methyl-pseudouridine, 4-thio-pseudouridine, 5-aza-uridine, dihydropseudouridine, 5-methoxyuridine and 2′-O-methyl uridine. In some embodiments, polynucleotides (e.g., RNA polynucleotides, such as mRNA polynucleotides) include a combination of at least two (e.g., 2, 3, 4 or more) of the aforementioned modified nucleobases.

[0769] In some embodiments, modified nucleobases in polynucleotides (e.g., RNA polynucleotides, such as mRNA polynucleotides) are selected from the group consisting of 1-methyl-pseudouridine (m¹ψ), 5-methoxy-uridine (mo⁵U), 5-methyl-cytidine (m⁵C), pseudouridine (ψ), α-thio-guanosine and α-thio-adenosine. In some embodiments, polynucleotides (e.g., RNA polynucleotides, such as mRNA polynucleotides) include a combination of at least two (e.g., 2, 3, 4 or more) of the aforementioned modified nucleobases.

[0770] In some embodiments, polynucleotides (e.g., RNA polynucleotides, such as mRNA polynucleotides) comprise pseudouridine (ψ) and 5-methyl-cytidine (m⁵C). In some embodiments, polynucleotides (e.g., RNA polynucleotides, such as mRNA polynucleotides) comprise 1-methyl-pseudouridine (m¹ψ). In some embodiments, polynucleotides (e.g., RNA polynucleotides, such as mRNA polynucleotides) comprise 1-methyl-pseudouridine (m¹ψ) and 5-methyl-cytidine (m⁵C). In some embodiments, polynucleotides (e.g., RNA polynucleotides, such as mRNA polynucleotides) comprise 2-thiouridine (s²U). In some embodiments, polynucleotides (e.g., RNA polynucleotides, such as mRNA polynucleotides) comprise 2-thiouridine and 5-methyl-cytidine (m⁵C). In some embodiments, polynucleotides (e.g., RNA polynucleotides, such as mRNA polynucleotides) comprise methoxy-uridine (mo⁵U). In some embodiments, polynucleotides (e.g., RNA polynucleotides, such as mRNA polynucleotides) comprise 5-methoxy-uridine (mo⁵U) and 5-methyl-cytidine (m⁵C). In some embodiments, polynucleotides (e.g., RNA polynucleotides, such as mRNA polynucleotides) comprise 2′-O-methyl uridine. In some embodiments polynucleotides (e.g., RNA polynucleotides, such as mRNA polynucleotides) comprise 2′-O-methyl uridine and 5-methyl-cytidine (m⁵C). In some embodiments, polynucleotides (e.g., RNA polynucleotides, such as mRNA polynucleotides) comprise N6-methyl-adenosine (m⁶A). In some embodiments, polynucleotides (e.g., RNA polynucleotides, such as mRNA polynucleotides) comprise N6-methyl-adenosine (m⁶A) and 5-methyl-cytidine (m⁵C).

[0771] In some embodiments, polynucleotides (e.g., RNA polynucleotides, such as mRNA polynucleotides) are uniformly modified (e.g., fully modified, modified throughout the entire sequence) for a particular modification. For example, a polynucleotide can be uniformly modified with 5-methyl-cytidine (m⁵C), meaning that all cytosine residues in the mRNA sequence are replaced with 5-methyl-cytidine (m⁵C). Similarly, a polynucleotide can be uniformly modified for any type of nucleoside residue present in the sequence by replacement with a modified residue such as those set forth above.

[0772] Exemplary nucleobases and nucleosides having a modified cytosine include N4-acetyl-cytidine (ac4C), 5-methyl-cytidine (m5C), 5-halo-cytidine (e.g., 5-iodo-cytidine), 5-hydroxymethyl-cytidine (hm5C), 1-methyl-pseudoisocytidine, 2-thio-cytidine (s2C), and 2-thio-5-methyl-cytidine.

[0773] In some embodiments, a modified nucleobase is a modified uridine. In some embodiments, a modified nucleobase is a modified cytosine. Nucleosides having a modified uridine include 5-cyano uridine, and 4′-thio uridine.

[0774] In some embodiments, a modified nucleobase is a modified adenine. Exemplary nucleobases and nucleosides having a modified adenine include 7-deaza-adenine, 1-methyl-adenosine (m1A), 2-methyl-adenine (m2A), and N6-methyl-adenosine (m6A).

[0775] In some embodiments, a modified nucleobase is a modified guanine. Exemplary nucleobases and nucleosides having a modified guanine include inosine (I), 1-methyl-inosine (m1I), wyosine (imG), methylwyosine (mimG), 7-deaza-guanosine, 7-cyano-7-deaza-guanosine (preQ0), 7-aminomethyl-7-deaza-guanosine (preQ1), 7-methyl-guanosine (m7G), 1-methyl-guanosine (m1G), 8-oxo-guanosine, 7-methyl-8-oxo-guanosine.

[0776] The polynucleotides of the present disclosure may be partially or fully modified along the entire length of the molecule. For example, one or more or all or a given type of nucleotide (e.g., purine or pyrimidine, or any one or more or all of A, G, U, C) may be uniformly modified in a polynucleotide of the invention, or in a given predetermined sequence region thereof (e.g., in the mRNA including or excluding the polyA tail). In some embodiments, all nucleotides X in a polynucleotide of the present disclosure (or in a given sequence region thereof) are modified nucleotides, wherein X may any one of nucleotides A, G, U, C, or any one of the combinations A+G, A+U, A+C, G+U, G+C, U+C, A+G+U, A+G+C, G+U+C or A+G+C.

[0777] The polynucleotide may contain from about 1% to about 100% modified nucleotides (either in relation to overall nucleotide content, or in relation to one or more types of nucleotide, i.e., any one or more of A, G, U or C) or any intervening percentage (e.g., from 1% to 20%, from 1% to 25%, from 1% to 50%, from 1% to 60%, from 1% to 70%, from 1% to 80%, from 1% to 90%, from 1% to 95%, from 10% to 20%, from 10% to 25%, from 10% to 50%, from 10% to 60%, from 10% to 70%, from 10% to 80%, from 10% to 90%, from 10% to 95%, from 10% to 100%, from 20% to 25%, from 20% to 50%, from 20% to 60%, from 20% to 70%, from 20% to 80%, from 20% to 90%, from 20% to 95%, from 20% to 100%, from 50% to 60%, from 50% to 70%, from 50% to 80%, from 50% to 90%, from 50% to 95%, from 50% to 100%, from 70% to 80%, from 70% to 90%, from 70% to 95%, from 70% to 100%, from 80% to 90%, from 80% to 95%, from 80% to 100%, from 90% to 95%, from 90% to 100%, and from 95% to 100%). Any remaining percentage is accounted for by the presence of unmodified A, G, U, or C.

[0778] The polynucleotides may contain at a minimum 1% and at maximum 100% modified nucleotides, or any intervening percentage, such as at least 5% modified nucleotides, at least 10% modified nucleotides, at least 25% modified nucleotides, at least 50% modified nucleotides, at least 80% modified nucleotides, or at least 90% modified nucleotides. For example, the polynucleotides may contain a modified pyrimidine such as a modified uracil or cytosine. In some embodiments, at least 5%, at least 10%, at least 25%, at least 50%, at least 80%, at least 90% or 100% of the uracil in the polynucleotide is replaced with a modified uracil (e.g., a 5-substituted uracil). The modified uracil can be replaced by a compound having a single unique structure, or can be replaced by a plurality of compounds having different structures (e.g., 2, 3, 4 or more unique structures). In some embodiments, at least 5%, at least 10%, at least 25%, at least 50%, at least 80%, at least 90% or 100% of the cytosine in the polynucleotide is replaced with a modified cytosine (e.g., a 5-substituted cytosine). The modified cytosine can be replaced by a compound having a single unique structure, or can be replaced by a plurality of compounds having different structures (e.g., 2, 3, 4 or more unique structures).

[0779] Thus, in some embodiments, the RNA (e.g., mRNA) vaccines comprise a 5′UTR element, an optionally codon optimized open reading frame, and a 3′UTR element, a poly(A) sequence and/or a polyadenylation signal wherein the RNA is not chemically modified.

[0780] In some embodiments, the modified nucleobase is a modified uracil. Exemplary nucleobases and nucleosides having a modified uracil include pseudouridine (ψ), pyridin-4-one ribonucleoside, 5-aza-uridine, 6-aza-uridine, 2-thio-5-aza-uridine, 2-thio-uridine (s²U), 4-thio-uridine (s⁴U), 4-thio-pseudouridine, 2-thio-pseudouridine, 5-hydroxy-uridine (ho⁵U), 5-aminoallyl-uridine, 5-halo-uridine (e.g., 5-iodo-uridine or 5-bromo-uridine), 3-methyl-uridine (m³U), 5-methoxy-uridine (mo⁵U), uridine 5-oxyacetic acid (cmo⁵U), uridine 5-oxyacetic acid methyl ester (mcmo⁵U), 5-carboxymethyl-uridine (cm⁵U), 1-carboxymethyl-pseudouridine, 5-carboxyhydroxymethyl-uridine (chm⁵U), 5-carboxyhydroxymethyl-uridine methyl ester (mchm⁵U), 5-methoxycarbonylmethyl-uridine (mcm⁵U), 5-methoxycarbonylmethyl-2-thio-uridine (mcm⁵s²U), 5-aminomethyl-2-thio-uridine (nm⁵s²U), 5-methylaminomethyl-uridine (mnm⁵U), 5-methylaminomethyl-2-thio-uridine (mnm⁵s²U), 5-methylaminomethyl-2-seleno-uridine (mnm⁵se²U), 5-carbamoylmethyl-uridine (ncm⁵U), 5-carboxymethylaminomethyl-uridine (cmnm⁵U), 5-carboxymethylaminomethyl-2-thio-uridine (cmnm⁵s²U), 5-propynyl-uridine, 1-propynyl-pseudouridine, 5-taurinomethyl-uridine (τm⁵U), 1-taurinomethyl-pseudouridine, 5-taurinomethyl-2-thio-uridine (τms²U), 1-taurinomethyl-4-thio-pseudouridine, 5-methyl-uridine (m⁵U, i.e., having the nucleobase deoxythymine), 1-methyl-pseudouridine (mw), 5-methyl-2-thio-uridine (m⁵s²U), 1-methyl-4-thio-pseudouridine (m¹s⁴ψ), 4-thio-1-methyl-pseudouridine, 3-methyl-pseudouridine (m³ψ), 2-thio-1-methyl-pseudouridine, 1-methyl-1-deaza-pseudouridine, 2-thio-1-methyl-1-deaza-pseudouridine, dihydrouridine (D), dihydropseudouridine, 5,6-dihydrouridine, 5-methyl-dihydrouridine (m⁵D), 2-thio-dihydrouridine, 2-thio-dihydropseudouridine, 2-methoxy-uridine, 2-methoxy-4-thio-uridine, 4-methoxy-pseudouridine, 4-methoxy-2-thio-pseudouridine, N1-methyl-pseudouridine, 3-(3-amino-3-carboxypropyl) uridine (acp³U), 1-methyl-3-(3-amino-3-carboxypropyl) pseudouridine (acp³ψ), 5-(isopentenylaminomethyl) uridine (inm⁵U), 5-(isopentenylaminomethyl)-2-thio-uridine (inm⁵s²U), α-thio-uridine, 2′-O-methyl-uridine (Um), 5,2′-O-dimethyl-uridine (m⁵Um), 2′-O-methyl-pseudouridine (ψm), 2-thio-2′-O-methyl-uridine (s²Um), 5-methoxycarbonylmethyl-2′-O-methyl-uridine (mcm⁵Um), 5-carbamoylmethyl-2′-O-methyl-uridine (ncm⁵Um), 5-carboxymethylaminomethyl-2′-O-methyl-uridine (cmnm⁵Um), 3,2′-O-dimethyl-uridine (m³Um), and 5-(isopentenylaminomethyl)-2′-O-methyl-uridine (inm⁵Um), 1-thio-uridine, deoxythymidine, 2′-F-ara-uridine, 2′-F-uridine, 2′-OH-ara-uridine, 5-(2-carbomethoxyvinyl) uridine, and 5-[3-(1-E-propenylamino)]uridine.

[0781] In some embodiments, the modified nucleobase is a modified cytosine. Exemplary nucleobases and nucleosides having a modified cytosine include 5-aza-cytidine, 6-aza-cytidine, pseudoisocytidine, 3-methyl-cytidine (m³C), N4-acetyl-cytidine (ac⁴C), 5-formyl-cytidine (f⁵C), N4-methyl-cytidine (m⁴C), 5-methyl-cytidine (m⁵C), 5-halo-cytidine (e.g., 5-iodo-cytidine), 5-hydroxymethyl-cytidine (hm⁵C), 1-methyl-pseudoisocytidine, pyrrolo-cytidine, pyrrolo-pseudoisocytidine, 2-thio-cytidine (s²C), 2-thio-5-methyl-cytidine, 4-thio-pseudoisocytidine, 4-thio-1-methyl-pseudoisocytidine, 4-thio-1-methyl-1-deaza-pseudoisocytidine, 1-methyl-1-deaza-pseudoisocytidine, zebularine, 5-aza-zebularine, 5-methyl-zebularine, 5-aza-2-thio-zebularine, 2-thio-zebularine, 2-methoxy-cytidine, 2-methoxy-5-methyl-cytidine, 4-methoxy-pseudoisocytidine, 4-methoxy-1-methyl-pseudoisocytidine, lysidine (k₂C), α-thio-cytidine, 2′-O-methyl-cytidine (Cm), 5,2′-O-dimethyl-cytidine (m⁵Cm), N4-acetyl-2′-O-methyl-cytidine (ac⁴Cm), N4,2′-O-dimethyl-cytidine (m⁴Cm), 5-formyl-2′-O-methyl-cytidine (f⁵Cm), N4,N4,2′-O-trimethyl-cytidine (m⁴₂ Cm), 1-thio-cytidine, 2′-F-ara-cytidine, 2′-F-cytidine, and 2′-OH-ara-cytidine.

[0782] In some embodiments, the modified nucleobase is a modified adenine. Exemplary nucleobases and nucleosides having a modified adenine include 2-amino-purine, 2, 6-diaminopurine, 2-amino-6-halo-purine (e.g., 2-amino-6-chloro-purine), 6-halo-purine (e.g., 6-chloro-purine), 2-amino-6-methyl-purine, 8-azido-adenosine, 7-deaza-adenine, 7-deaza-8-aza-adenine, 7-deaza-2-amino-purine, 7-deaza-8-aza-2-amino-purine, 7-deaza-2,6-diaminopurine, 7-deaza-8-aza-2,6-diaminopurine, 1-methyl-adenosine (m¹A), 2-methyl-adenine (m²A), N6-methyl-adenosine (m⁶A), 2-methylthio-N6-methyl-adenosine (ms²m⁶A), N6-isopentenyl-adenosine (i⁶A), 2-methylthio-N6-isopentenyl-adenosine (ms²i⁶A), N6-(cis-hydroxyisopentenyl) adenosine (io⁶A), 2-methylthio-N6-(cis-hydroxyisopentenyl) adenosine (ms²io⁶A), N6-glycinylcarbamoyl-adenosine (g⁶A), N6-threonylcarbamoyl-adenosine (t⁶A), N6-methyl-N6-threonylcarbamoyl-adenosine (m⁶t⁶A), 2-methylthio-N6-threonylcarbamoyl-adenosine (ms²g⁶A), N6,N6-dimethyl-adenosine (m⁶₂A), N6-hydroxynorvalylcarbamoyl-adenosine (hn⁶A), 2-methylthio-N6-hydroxynorvalylcarbamoyl-adenosine (ms²hn⁶A), N6-acetyl-adenosine (ac⁶A), 7-methyl-adenine, 2-methylthio-adenine, 2-methoxy-adenine, α-thio-adenosine, 2′-O-methyl-adenosine (Am), N6,2′-O-dimethyl-adenosine (m⁶Am), N6,N6,2′-O-trimethyl-adenosine (m⁶₂Am), 1,2′-O-dimethyl-adenosine (m¹Am), 2′-O-ribosyladenosine (phosphate) (Ar(p)), 2-amino-N6-methyl-purine, 1-thio-adenosine, 8-azido-adenosine, 2′-F-ara-adenosine, 2′-F-adenosine, 2′-OH-ara-adenosine, and N6-(19-amino-pentaoxanonadecyl)-adenosine.

[0783] In some embodiments, the modified nucleobase is a modified guanine. Exemplary nucleobases and nucleosides having a modified guanine include inosine (I), 1-methyl-inosine (m¹I), wyosine (imG), methylwyosine (mimG), 4-demethyl-wyosine (imG-14), isowyosine (imG2), wybutosine (yW), peroxywybutosine (o₂yW), hydroxywybutosine (OhyW), undermodified hydroxywybutosine (OhyW*), 7-deaza-guanosine, queuosine (Q), epoxyqueuosine (oQ), galactosyl-queuosine (galQ), mannosyl-queuosine (manQ), 7-cyano-7-deaza-guanosine (preQ₀), 7-aminomethyl-7-deaza-guanosine (preQ₁), archacosine (G⁺), 7-deaza-8-aza-guanosine, 6-thio-guanosine, 6-thio-7-deaza-guanosine, 6-thio-7-deaza-8-aza-guanosine, 7-methyl-guanosine (m⁷G), 6-thio-7-methyl-guanosine, 7-methyl-inosine, 6-methoxy-guanosine, 1-methyl-guanosine (m¹G), N2-methyl-guanosine (m²G), N2,N2-dimethyl-guanosine (m²₂G), N2,7-dimethyl-guanosine (m^{2,7}G), N2, N2,7-dimethyl-guanosine (m^{2,2,7}G), 8-oxo-guanosine, 7-methyl-8-oxo-guanosine, 1-methyl-6-thio-guanosine, N2-methyl-6-thio-guanosine, N2,N2-dimethyl-6-thio-guanosine, α-thio-guanosine, 2′-O-methyl-guanosine (Gm), N2-methyl-2′-O-methyl-guanosine (m²Gm), N2,N2-dimethyl-2′-O-methyl-guanosine (m²₂Gm), 1-methyl-2′-O-methyl-guanosine (m¹Gm), N2,7-dimethyl-2′-O-methyl-guanosine (m^{2,7}Gm), 2′-O-methyl-inosine (Im), 1,2′-O-dimethyl-inosine (m¹Im), 2′-O-ribosylguanosine (phosphate) (Gr(p)), 1-thio-guanosine, O6-methyl-guanosine, 2′-F-ara-guanosine, and 2′-F-guanosine.

### N-Linked Glycosylation Site Mutants

[0784] N-linked glycans of viral proteins play important roles in modulating the immune response. Glycans can be important for maintaining the appropriate antigenic conformations, shielding potential neutralization epitopes, and may alter the proteolytic susceptibility of proteins. Some viruses have putative N-linked glycosylation sites. Deletion or modification of an N-linked glycosylation site may enhance the immune response. Thus, the present disclosure provides, in some embodiments, RNA (e.g., mRNA) vaccines comprising nucleic acids (e.g., mRNA) encoding antigenic polypeptides that comprise a deletion or modification at one or more N-linked glycosylation sites.

In Vitro Transcription of RNA (e.g., mRNA)

[0785] Tropical disease vaccines of the present disclosure comprise at least one RNA polynucleotide, such as a mRNA (e.g., modified mRNA). mRNA, for example, is transcribed in vitro from template DNA, referred to as an “in vitro transcription template.” In some embodiments, an in vitro transcription template encodes a 5′ untranslated (UTR) region, contains an open reading frame, and encodes a 3′ UTR and a polyA tail. The particular nucleic acid sequence composition and length of an in vitro transcription template will depend on the mRNA encoded by the template.

[0786] A “5′ untranslated region” (5′UTR) refers to a region of an mRNA that is directly upstream (i.e., 5′) from the start codon (i.e., the first codon of an mRNA transcript translated by a ribosome) that does not encode a polypeptide.

[0787] A “3′ untranslated region” (3′UTR) refers to a region of an mRNA that is directly downstream (i.e., 3′) from the stop codon (i.e., the codon of an mRNA transcript that signals a termination of translation) that does not encode a polypeptide.

[0788] An “open reading frame” is a continuous stretch of DNA beginning with a start codon (e.g., methionine (ATG)), and ending with a stop codon (e.g., TAA, TAG or TGA) and encodes a polypeptide.

[0789] A “polyA tail” is a region of mRNA that is downstream, e.g., directly downstream (i.e., 3′), from the 3′ UTR that contains multiple, consecutive adenosine monophosphates. A polyA tail may contain 10 to 300 adenosine monophosphates. For example, a poly A tail may contain 10, 20, 30, 40, 50, 60, 70, 80, 90, 100, 110, 120, 130, 140, 150, 160, 170, 180, 190, 200, 210, 220, 230, 240, 250, 260, 270, 280, 290 or 300 adenosine monophosphates. In some embodiments, a polyA tail contains 50 to 250 adenosine monophosphates. In a relevant biological setting (e.g., in cells, in vivo) the poly(A) tail functions to protect mRNA from enzymatic degradation, e.g., in the cytoplasm, and aids in transcription termination, export of the mRNA from the nucleus and translation.

[0790] In some embodiments, a polynucleotide includes 200 to 3,000 nucleotides. For example, a polynucleotide may include 200 to 500, 200 to 1000, 200 to 1500, 200 to 3000, 500 to 1000, 500 to 1500, 500 to 2000, 500 to 3000, 1000 to 1500, 1000 to 2000, 1000 to 3000, 1500 to 3000, or 2000 to 3000 nucleotides.

### Flagellin Adjuvants

[0791] Flagellin is an approximately 500 amino acid monomeric protein that polymerizes to form the flagella associated with bacterial motion. Flagellin is expressed by a variety of flagellated bacteria (Salmonella typhimurium for example) as well as non-flagellated bacteria (such as Escherichia coli). Sensing of flagellin by cells of the innate immune system (dendritic cells, macrophages, etc.) is mediated by the Toll-like receptor 5 (TLR5) as well as by Nod-like receptors (NLRs) Ipaf and Naip5. TLRs and NLRs have been identified as playing a role in the activation of innate immune response and adaptive immune response. As such, flagellin provides an adjuvant effect in a vaccine.

[0792] The nucleotide and amino acid sequences encoding known flagellin polypeptides are publicly available in the NCBI GenBank database. The flagellin sequences from S. typhimurium, H. pylori, V. cholera, S. marcesens, S. flexneri, T. pallidum, L. pneumophila, B. burgdorferei, C. difficile, R. meliloti, A. tumefaciens, R. lupini, B. clarridgeiae, P. mirabilis, B. subtilus, L. monocytogenes, P. aeruginosa, and E. coli, among others are known.

[0793] A flagellin polypeptide, as used herein, refers to a full length flagellin protein, immunogenic fragments thereof, and peptides having at least 50% sequence identity to a flagellin protein or immunogenic fragments thereof. Exemplary flagellin proteins include flagellin from Salmonella typhi (UniPro Entry number: Q56086), Salmonella typhimurium (A0A0C9DG09), Salmonella enteritidis (A0A0C9BAB7), and Salmonella choleraesuis (Q6V2X8), and proteins having an amino acid sequence identified by any one of SEQ ID NO: 420-422 (Table 66). In some embodiments, the flagellin polypeptide has at least 60%, 70%, 75%, 80%, 90%, 95%, 97%, 98%, or 99% sequence identity to a flagellin protein or immunogenic fragments thereof.

[0794] In some embodiments, the flagellin polypeptide is an immunogenic fragment. An immunogenic fragment is a portion of a flagellin protein that provokes an immune response. In some embodiments, the immune response is a TLR5 immune response. An example of an immunogenic fragment is a flagellin protein in which all or a portion of a hinge region has been deleted or replaced with other amino acids. For example, an antigenic polypeptide may be inserted in the hinge region. Hinge regions are the hypervariable regions of a flagellin. Hinge regions of a flagellin are also referred to as “D3 domain or region,” “propeller domain or region,” “hypervariable domain or region” and “variable domain or region.” “At least a portion of a hinge region,” as used herein, refers to any part of the hinge region of the flagellin, or the entirety of the hinge region. In other embodiments an immunogenic fragment of flagellin is a 20, 25, 30, 35, or 40 amino acid C-terminal fragment of flagellin.

[0795] The flagellin monomer is formed by domains DO through D3. DO and D1, which form the stem, are composed of tandem long alpha helices and are highly conserved among different bacteria. The D1 domain includes several stretches of amino acids that are useful for TLR5 activation. The entire D1 domain or one or more of the active regions within the domain are immunogenic fragments of flagellin. Examples of immunogenic regions within the D1 domain include residues 88-114 and residues 411-431 in Salmonella typhimurium FliC flagellin. Within the 13 amino acids in the 88-100 region, at least 6 substitutions are permitted between Salmonella flagellin and other flagellins that still preserve TLR5 activation. Thus, immunogenic fragments of flagellin include flagellin like sequences that activate TLR5 and contain a 13 amino acid motif that is 53% or more identical to the Salmonella sequence in 88-100 of FliC (LQRVRELAVQSAN; SEQ ID NO: 428).

[0796] In some embodiments, the RNA (e.g., mRNA) vaccine includes an RNA that encodes a fusion protein of flagellin and one or more antigenic polypeptides. A “fusion protein” as used herein, refers to a linking of two components of the construct. In some embodiments, a carboxy-terminus of the antigenic polypeptide is fused or linked to an amino terminus of the flagellin polypeptide. In other embodiments, an amino-terminus of the antigenic polypeptide is fused or linked to a carboxy-terminus of the flagellin polypeptide. The fusion protein may include, for example, one, two, three, four, five, six or more flagellin polypeptides linked to one, two, three, four, five, six or more antigenic polypeptides. When two or more flagellin polypeptides and/or two or more antigenic polypeptides are linked such a construct may be referred to as a “multimer.”

[0797] Each of the components of a fusion protein may be directly linked to one another or they may be connected through a linker. For instance, the linker may be an amino acid linker. The amino acid linker encoded for by the RNA (e.g., mRNA) vaccine to link the components of the fusion protein may include, for instance, at least one member selected from the group consisting of a lysine residue, a glutamic acid residue, a serine residue and an arginine residue. In some embodiments the linker is 1-30, 1-25, 1-25, 5-10, 5, 15, or 5-20 amino acids in length.

[0798] In other embodiments the RNA (e.g., mRNA) vaccine includes at least two separate RNA polynucleotides, one encoding one or more antigenic polypeptides and the other encoding the flagellin polypeptide. The at least two RNA polynucleotides may be co-formulated in a carrier such as a lipid nanoparticle.

Broad Spectrum RNA (e.g., mRNA) Vaccines

[0799] There may be situations where persons are at risk for infection with more than one strain of Malaria (e.g., P. falciparum, P. vivax, P. malariae and/or P. ovale), JEV, WNV, EEEV, VEEV, SINV, CHIKV, DENV, ZIKV and/or YFV. RNA (e.g., mRNA) therapeutic vaccines are particularly amenable to combination vaccination approaches due to a number of factors including, but not limited to, speed of manufacture, ability to rapidly tailor vaccines to accommodate perceived geographical threat, and the like. Moreover, because the vaccines utilize the human body to produce the antigenic protein, the vaccines are amenable to the production of larger, more complex antigenic proteins, allowing for proper folding, surface expression, antigen presentation, etc. in the human subject. To protect against more than one strain of Malaria (e.g., P. falciparum, P. vivax, P. malariae and/or P. ovale), JEV, WNV, EEEV, VEEV, SINV, CHIKV, DENV, ZIKV and/or YFV, a combination vaccine can be administered that includes RNA (e.g., mRNA) encoding at least one antigenic polypeptide protein (or antigenic portion thereof) of a first tropical disease virus or organism and further includes RNA encoding at least one antigenic polypeptide protein (or antigenic portion thereof) of a second tropical disease virus or organism. RNA (e.g., mRNA) can be co-formulated, for example, in a single lipid nanoparticle (LNP) or can be formulated in separate LNPs for co-administration.

### Methods of Treatment

[0800] Provided herein are compositions (e.g., pharmaceutical compositions), methods, kits and reagents for prevention and/or treatment of tropical diseases in humans and other mammals. Tropical disease RNA (e.g. mRNA) vaccines can be used as therapeutic or prophylactic agents, alone or in combination with other vaccine(s). They may be used in medicine to prevent and/or treat tropical disease. In exemplary aspects, the RNA (e.g., mRNA) vaccines of the present disclosure are used to provide prophylactic protection from Malaria (e.g., P. falciparum, P. vivax, P. malariae and/or P. ovale), JEV, WNV, EEEV, VEEV, SINV, CHIKV, DENV, ZIKV and/or YFV. Prophylactic protection from Malaria (e.g., P. falciparum, P. vivax, P. malariae and/or P. ovale), JEV, WNV, EEEV, VEEV, SINV, CHIKV, DENV, ZIKV and/or YFV can be achieved following administration of a RNA (e.g., mRNA) vaccine of the present disclosure. Tropical disease RNA (e.g., mRNA) vaccines of the present disclosure may be used to treat or prevent viral “co-infections” containing two or more tropical disease infections. Vaccines can be administered once, twice, three times, four times or more, but it is likely sufficient to administer the vaccine once (optionally followed by a single booster). It is possible, although less desirable, to administer the vaccine to an infected individual to achieve a therapeutic response. Dosing may need to be adjusted accordingly.

[0801] A method of eliciting an immune response in a subject against Malaria (e.g., P. falciparum, P. vivax, P. malariae and/or P. ovale), JEV, WNV, EEEV, VEEV, SINV, CHIKV, DENV, ZIKV and/or YFV is provided in aspects of the present disclosure. The method involves administering to the subject a tropical disease RNA (e.g., mRNA) vaccine comprising at least one RNA (e.g., mRNA) polynucleotide having an open reading frame encoding at least one Malaria (e.g., P. falciparum, P. vivax, P. malariae and/or P. ovale), JEV, WNV, EEEV, VEEV, SINV, CHIKV, DENV, ZIKV and/or YFV antigenic polypeptide, thereby inducing in the subject an immune response specific to Malaria (e.g., P. falciparum, P. vivax, P. malariae and/or P. ovale), JEV, WNV, EEEV, VEEV, SINV, CHIKV, DENV, ZIKV and/or YFV antigenic polypeptide or an immunogenic fragment thereof, wherein anti-antigenic polypeptide antibody titer in the subject is increased following vaccination relative to anti-antigenic polypeptide antibody titer in a subject vaccinated with a prophylactically effective dose of a traditional vaccine against Malaria (e.g., P. falciparum, P. vivax, P. malariae and/or P. ovale), JEV, WNV, EEEV, VEEV, SINV, CHIKV, DENV, ZIKV and/or YFV. An “anti-antigenic polypeptide antibody” is a serum antibody the binds specifically to the antigenic polypeptide.

[0802] In some embodiments, a RNA (e.g., mRNA) vaccine (e.g., a Malaria (e.g., P. falciparum, P. vivax, P. malariae and/or P. ovale), JEV, WNV, EEEV, VEEV, SINV, CHIKV, DENV, ZIKV and/or YFV RNA vaccine) capable of eliciting an immune response is administered intramuscularly or intranasally via a composition including a compound according to Formula (I), (IA), (II), (IIa), (IIb), (IIc), (IId) or (IIc) (e.g., Compound 3, 18, 20, 25, 26, 29, 30, 60, 108-112, or 122).

[0803] A prophylactically effective dose is a therapeutically effective dose that prevents infection with the virus at a clinically acceptable level. In some embodiments the therapeutically effective dose is a dose listed in a package insert for the vaccine. A traditional vaccine, as used herein, refers to a vaccine other than the RNA (e.g., mRNA) vaccines of the present disclosure. For instance, a traditional vaccine includes but is not limited to live/attenuated microorganism vaccines, killed/inactivated microorganism vaccines, subunit vaccines, protein antigen vaccines, DNA vaccines, VLP vaccines, etc. In exemplary embodiments, a traditional vaccine is a vaccine that has achieved regulatory approval and/or is registered by a national drug regulatory body, for example the Food and Drug Administration (FDA) in the United States or the European Medicines Agency (EMA).

[0804] In some embodiments the anti-antigenic polypeptide antibody titer in the subject is increased 1 log to 10 log following vaccination relative to anti-antigenic polypeptide antibody titer in a subject vaccinated with a prophylactically effective dose of a traditional vaccine against Malaria (e.g., P. falciparum, P. vivax, P. malariae and/or P. ovale), JEV, WNV, EEEV, VEEV, SINV, CHIKV, DENV, ZIKV and/or YFV.

[0805] In some embodiments the anti-antigenic polypeptide antibody titer in the subject is increased 1 log, 2 log, 3 log, 5 log or 10 log following vaccination relative to anti-antigenic polypeptide antibody titer in a subject vaccinated with a prophylactically effective dose of a traditional vaccine against Malaria (e.g., P. falciparum, P. vivax, P. malariae and/or P. ovale), JEV, WNV, EEEV, VEEV, SINV, CHIKV, DENV, ZIKV and/or YFV.

[0806] A method of eliciting an immune response in a subject against Malaria (e.g., P. falciparum, P. vivax, P. malariae and/or P. ovale), JEV, WNV, EEEV, VEEV, SINV, CHIKV, DENV, ZIKV and/or YFV is provided in other aspects of the disclosure. The method involves administering to the subject a tropical disease RNA (e.g., mRNA) vaccine comprising at least one RNA (e.g., mRNA) polynucleotide having an open reading frame encoding at least one Malaria (e.g., P. falciparum, P. vivax, P. malariae and/or P. ovale), JEV, WNV, EEEV, VEEV, SINV, CHIKV, DENV, ZIKV and/or YFV antigenic polypeptide or an immunogenic fragment thereof, thereby inducing in the subject an immune response specific to Malaria (e.g., P. falciparum, P. vivax, P. malariae and/or P. ovale), JEV, WNV, EEEV, VEEV, SINV, CHIKV, DENV, ZIKV and/or YFV antigenic polypeptide or an immunogenic fragment thereof, wherein the immune response in the subject is equivalent to an immune response in a subject vaccinated with a traditional vaccine against the Malaria (e.g., P. falciparum, P. vivax, P. malariae and/or P. ovale), JEV, WNV, EEEV, VEEV, SINV, CHIKV, DENV, ZIKV and/or YFV at 2 times to 100 times the dosage level relative to the RNA (e.g., mRNA) vaccine.

[0807] In some embodiments, the immune response in the subject is equivalent to an immune response in a subject vaccinated with a traditional vaccine at 2, 3, 4, 5, 10, 50, 100 times the dosage level relative to the Malaria (e.g., P. falciparum, P. vivax, P. malariae and/or P. ovale), JEV, WNV, EEEV, VEEV, SINV, CHIKV, DENV, ZIKV and/or YFV RNA (e.g., mRNA) vaccine.

[0808] In some embodiments the immune response in the subject is equivalent to an immune response in a subject vaccinated with a traditional vaccine at 10-100 times, or 100-1000 times, the dosage level relative to the Malaria (e.g., P. falciparum, P. vivax, P. malariae and/or P. ovale), JEV, WNV, EEEV, VEEV, SINV, CHIKV, DENV, ZIKV and/or YFV RNA (e.g., mRNA) vaccine.

[0809] In some embodiments the immune response is assessed by determining protein antibody titer in the subject.

[0810] Some embodiments provide a method of inducing an immune response in a subject by administering to the subject a tropical disease RNA (e.g., mRNA) vaccine comprising at least one RNA (e.g., mRNA) polynucleotide having an open reading frame encoding at least one Malaria (e.g., P. falciparum, P. vivax, P. malariae and/or P. ovale), JEV, WNV, EEEV, VEEV, SINV, CHIKV, DENV, ZIKV and/or YFV antigenic polypeptide, thereby inducing in the subject an immune response specific to the antigenic polypeptide or an immunogenic fragment thereof, wherein the immune response in the subject is induced 2 days to 10 weeks earlier relative to an immune response induced in a subject vaccinated with a prophylactically effective dose of a traditional vaccine against Malaria (e.g., P. falciparum, P. vivax, P. malariae and/or P. ovale), JEV, WNV, EEEV, VEEV, SINV, CHIKV, DENV, ZIKV and/or YFV. In some embodiments, the immune response in the subject is induced in a subject vaccinated with a prophylactically effective dose of a traditional vaccine at 2 times to 100 times the dosage level relative to the RNA (e.g., mRNA) vaccine.

[0811] In some embodiments the immune response in the subject is equivalent to an immune response in a subject vaccinated with a traditional vaccine at 2, 3, 4, 5, 10, 50, 100 times the dosage level relative to the Malaria (e.g., P. falciparum, P. vivax, P. malariae and/or P. ovale), JEV, WNV, EEEV, VEEV, SINV, CHIKV, DENV, ZIKV and/or YFV RNA (e.g., mRNA) vaccine.

[0812] In some embodiments, the immune response in the subject is induced 2 days earlier, or 3 days earlier, relative to an immune response induced in a subject vaccinated with a prophylactically effective dose of a traditional vaccine.

[0813] In some embodiments the immune response in the subject is induced 1 week, 2 weeks, 3 weeks, 5 weeks, or 10 weeks earlier relative to an immune response induced in a subject vaccinated with a prophylactically effective dose of a traditional vaccine.

### Therapeutic and Prophylactic Compositions

[0814] Provided herein are compositions (e.g., pharmaceutical compositions), methods, kits and reagents for prevention, treatment or diagnosis of Malaria (e.g., P. falciparum, P. vivax, P. malariae and/or P. ovale), JEV, WNV, EEEV, VEEV, SINV, CHIKV, DENV, ZIKV and/or YFV in humans and other mammals, for example. Tropical disease RNA (e.g. mRNA) vaccines can be used as therapeutic or prophylactic agents. They may be used in medicine to prevent and/or treat infectious disease. In some embodiments, the RNA (e.g., mRNA) vaccines of the present disclosure are used fin the priming of immune effector cells, for example, to activate peripheral blood mononuclear cells (PBMCs) ex vivo, which are then infused (re-infused) into a subject.

[0815] In some embodiments, tropical disease vaccine containing RNA (e.g., mRNA) polynucleotides as described herein can be administered to a subject (e.g., a mammalian subject, such as a human subject), and the RNA (e.g., mRNA) polynucleotides are translated in vivo to produce an antigenic polypeptide.

[0816] The tropical disease RNA (e.g., mRNA) vaccines may be induced for translation of a polypeptide (e.g., antigen or immunogen) in a cell, tissue or organism. In some embodiments, such translation occurs in vivo, although such translation may occur ex vivo, in culture or in vitro. In some embodiments, the cell, tissue or organism is contacted with an effective amount of a composition containing a tropical disease RNA (e.g., mRNA) vaccine that contains a polynucleotide that has at least one a translatable region encoding an antigenic polypeptide.

[0817] An “effective amount” of a tropical disease RNA (e.g. mRNA) vaccine is provided based, at least in part, on the target tissue, target cell type, means of administration, physical characteristics of the polynucleotide (e.g., size, and extent of modified nucleosides) and other components of the vaccine, and other determinants. In general, an effective amount of the tropical disease RNA (e.g., mRNA) vaccine composition provides an induced or boosted immune response as a function of antigen production in the cell, preferably more efficient than a composition containing a corresponding unmodified polynucleotide encoding the same antigen or a peptide antigen. Increased antigen production may be demonstrated by increased cell transfection (the percentage of cells transfected with the RNA, e.g., mRNA, vaccine), increased protein translation from the polynucleotide, decreased nucleic acid degradation (as demonstrated, for example, by increased duration of protein translation from a modified polynucleotide), or altered antigen specific immune response of the host cell.

[0818] In some embodiments, RNA (e.g. mRNA) vaccines (including polynucleotides their encoded polypeptides) in accordance with the present disclosure may be used for treatment of Malaria (e.g., P. falciparum, P. vivax, P. malariae and/or P. ovale), JEV, WNV, EEEV, VEEV, SINV, CHIKV, DENV, ZIKV and/or YFV.

[0819] Tropical disease RNA (e.g. mRNA) vaccines may be administered prophylactically or therapeutically as part of an active immunization scheme to healthy individuals or early in infection during the incubation phase or during active infection after onset of symptoms. In some embodiments, the amount of RNA (e.g., mRNA) vaccine of the present disclosure provided to a cell, a tissue or a subject may be an amount effective for immune prophylaxis.

[0820] Tropical disease RNA (e.g. mRNA) vaccines may be administrated with other prophylactic or therapeutic compounds. As a non-limiting example, a prophylactic or therapeutic compound may be an adjuvant or a booster. As used herein, when referring to a prophylactic composition, such as a vaccine, the term “booster” refers to an extra administration of the prophylactic (vaccine) composition. A booster (or booster vaccine) may be given after an earlier administration of the prophylactic composition. The time of administration between the initial administration of the prophylactic composition and the booster may be, but is not limited to, 1 minute, 2 minutes, 3 minutes, 4 minutes, 5 minutes, 6 minutes, 7 minutes, 8 minutes, 9 minutes, 10 minutes, 15 minutes, 20 minutes 35 minutes, 40 minutes, 45 minutes, 50 minutes, 55 minutes, 1 hour, 2 hours, 3 hours, 4 hours, 5 hours, 6 hours, 7 hours, 8 hours, 9 hours, 10 hours, 11 hours, 12 hours, 13 hours, 14 hours, 15 hours, 16 hours, 17 hours, 18 hours, 19 hours, 20 hours, 21 hours, 22 hours, 23 hours, 1 day, 36 hours, 2 days, 3 days, 4 days, 5 days, 6 days, 1 week, 10 days, 2 weeks, 3 weeks, 1 month, 2 months, 3 months, 4 months, 5 months, 6 months, 7 months, 8 months, 9 months, 10 months, 11 months, 1 year, 18 months, 2 years, 3 years, 4 years, 5 years, 6 years, 7 years, 8 years, 9 years, 10 years, 11 years, 12 years, 13 years, 14 years, 15 years, 16 years, 17 years, 18 years, 19 years, 20 years, 25 years, 30 years, 35 years, 40 years, 45 years, 50 years, 55 years, 60 years, 65 years, 70 years, 75 years, 80 years, 85 years, 90 years, 95 years or more than 99 years. In some embodiments, the time of administration between the initial administration of the prophylactic composition and the booster may be, but is not limited to, 1 week, 2 weeks, 3 weeks, 1 month, 2 months, 3 months, 6 months or 1 year.

[0821] In some embodiments, tropical disease RNA (e.g. mRNA) vaccines may be administered intramuscularly, intradermally, or intranasally, similarly to the administration of inactivated vaccines known in the art.

[0822] Tropical disease RNA (e.g. mRNA) vaccines may be utilized in various settings depending on the prevalence of the infection or the degree or level of unmet medical need. As a non-limiting example, the RNA (e.g., mRNA) vaccines may be utilized to treat and/or prevent a variety of tropical diseases. RNA (e.g., mRNA) vaccines have superior properties in that they produce much larger antibody titers and produce responses early than commercially available anti-viral agents/compositions.

[0823] Provided herein are pharmaceutical compositions including tropical disease RNA (e.g. mRNA) vaccines and RNA (e.g. mRNA) vaccine compositions and/or complexes optionally in combination with one or more pharmaceutically acceptable excipients.

[0824] Malaria (e.g., P. falciparum, P. vivax, P. malariae and/or P. ovale), JEV, WNV, EEEV, VEEV, SINV, CHIKV, DENV, ZIKV and/or YFV RNA (e.g. mRNA) vaccines may be formulated or administered alone or in conjunction with one or more other components. For instance, Malaria (e.g., P. falciparum, P. vivax, P. malariae and/or P. ovale), JEV, WNV, EEEV, VEEV, SINV, CHIKV, DENV, ZIKV and/or YFV RNA (e.g., mRNA) vaccines (vaccine compositions) may comprise other components including, but not limited to, adjuvants.

[0825] In some embodiments, tropical disease (e.g. mRNA) vaccines do not include an adjuvant (they are adjuvant free).

[0826] Tropical disease RNA (e.g. mRNA) vaccines may be formulated or administered in combination with one or more pharmaceutically-acceptable excipients. In some embodiments, vaccine compositions comprise at least one additional active substances, such as, for example, a therapeutically-active substance, a prophylactically-active substance, or a combination of both. Vaccine compositions may be sterile, pyrogen-free or both sterile and pyrogen-free. General considerations in the formulation and/or manufacture of pharmaceutical agents, such as vaccine compositions, may be found, for example, in Remington: The Science and Practice of Pharmacy 21st ed., Lippincott Williams & Wilkins, 2005 (incorporated herein by reference in its entirety).

[0827] In some embodiments, tropical disease RNA (e.g. mRNA) vaccines are administered to humans, human patients or subjects. For the purposes of the present disclosure, the phrase “active ingredient” generally refers to the RNA (e.g., mRNA) vaccines or the polynucleotides contained therein, for example, RNA polynucleotides (e.g., mRNA polynucleotides) encoding antigenic polypeptides.

[0828] Formulations of the tropical disease vaccine compositions described herein may be prepared by any method known or hereafter developed in the art of pharmacology. In general, such preparatory methods include the step of bringing the active ingredient (e.g., mRNA polynucleotide) into association with an excipient and/or one or more other accessory ingredients, and then, if necessary and/or desirable, dividing, shaping and/or packaging the product into a desired single- or multi-dose unit.

[0829] Relative amounts of the active ingredient, the pharmaceutically acceptable excipient, and/or any additional ingredients in a pharmaceutical composition in accordance with the disclosure will vary, depending upon the identity, size, and/or condition of the subject treated and further depending upon the route by which the composition is to be administered. By way of example, the composition may comprise between 0.1% and 100%, e.g., between 0.5 and 50%, between 1-30%, between 5-80%, at least 80% (w/w) active ingredient.

[0830] Tropical disease RNA (e.g. mRNA) vaccines can be formulated using one or more excipients to: increase stability; increase cell transfection; permit the sustained or delayed release (e.g., from a depot formulation); alter the biodistribution (e.g., target to specific tissues or cell types); increase the translation of encoded protein in vivo; and/or alter the release profile of encoded protein (antigen) in vivo. In addition to traditional excipients such as any and all solvents, dispersion media, diluents, or other liquid vehicles, dispersion or suspension aids, surface active agents, isotonic agents, thickening or emulsifying agents, preservatives, excipients can include, without limitation, lipidoids, liposomes, lipid nanoparticles, polymers, lipoplexes, core-shell nanoparticles, peptides, proteins, cells transfected with tropical disease RNA (e.g. mRNA) vaccines (e.g., for transplantation into a subject), hyaluronidase, nanoparticle mimics and combinations thereof.

### Stabilizing Elements

[0831] Naturally-occurring eukaryotic mRNA molecules have been found to contain stabilizing elements, including, but not limited to untranslated regions (UTR) at their 5′-end (5′UTR) and/or at their 3′-end (3′UTR), in addition to other structural features, such as a 5′-cap structure or a 3′-poly(A) tail. Both the 5′UTR and the 3′UTR are typically transcribed from the genomic DNA and are elements of the premature mRNA. Characteristic structural features of mature mRNA, such as the 5′-cap and the 3′-poly(A) tail are usually added to the transcribed (premature) mRNA during mRNA processing. The 3′-poly(A) tail is typically a stretch of adenine nucleotides added to the 3′-end of the transcribed mRNA. It can comprise up to about 400 adenine nucleotides. In some embodiments the length of the 3′-poly(A) tail may be an essential element with respect to the stability of the individual mRNA.

[0832] In some embodiments the RNA (e.g., mRNA) vaccine may include one or more stabilizing elements. Stabilizing elements may include for instance a histone stem-loop. A stem-loop binding protein (SLBP), a 32 kDa protein has been identified. It is associated with the histone stem-loop at the 3′-end of the histone messages in both the nucleus and the cytoplasm. Its expression level is regulated by the cell cycle; it peaks during the S-phase, when histone mRNA levels are also elevated. The protein has been shown to be essential for efficient 3′-end processing of histone pre-mRNA by the U7 snRNP. SLBP continues to be associated with the stem-loop after processing, and then stimulates the translation of mature histone mRNAs into histone proteins in the cytoplasm. The RNA binding domain of SLBP is conserved through metazoa and protozoa; its binding to the histone stem-loop depends on the structure of the loop. The minimum binding site includes at least three nucleotides 5′ and two nucleotides 3′ relative to the stem-loop.

[0833] In some embodiments, the RNA (e.g., mRNA) vaccines include a coding region, at least one histone stem-loop, and optionally, a poly(A) sequence or polyadenylation signal. The poly(A) sequence or polyadenylation signal generally should enhance the expression level of the encoded protein. The encoded protein, in some embodiments, is not a histone protein, a reporter protein (e.g. Luciferase, GFP, EGFP, β-Galactosidase, EGFP), or a marker or selection protein (e.g. alpha-Globin, Galactokinase and Xanthine: guanine phosphoribosyl transferase (GPT)).

[0834] In some embodiments, the combination of a poly(A) sequence or polyadenylation signal and at least one histone stem-loop, even though both represent alternative mechanisms in nature, acts synergistically to increase the protein expression beyond the level observed with either of the individual elements. It has been found that the synergistic effect of the combination of poly(A) and at least one histone stem-loop does not depend on the order of the elements or the length of the poly(A) sequence.

[0835] In some embodiments, the RNA (e.g., mRNA) vaccine does not comprise a histone downstream element (HDE). “Histone downstream element” (HDE) includes a purine-rich polynucleotide stretch of approximately 15 to 20 nucleotides 3′ of naturally occurring stem-loops, representing the binding site for the U7 snRNA, which is involved in processing of histone pre-mRNA into mature histone mRNA. Ideally, the inventive nucleic acid does not include an intron.

[0836] In some embodiments, the RNA (e.g., mRNA) vaccine may or may not contain an enhancer and/or promoter sequence, which may be modified or unmodified or which may be activated or inactivated. In some embodiments, the histone stem-loop is generally derived from histone genes, and includes an intramolecular base pairing of two neighbored partially or entirely reverse complementary sequences separated by a spacer, including (e.g., consisting of) a short sequence, which forms the loop of the structure. The unpaired loop region is typically unable to base pair with either of the stem loop elements. It occurs more often in RNA, as is a key component of many RNA secondary structures, but may be present in single-stranded DNA as well. Stability of the stem-loop structure generally depends on the length, number of mismatches or bulges, and base composition of the paired region. In some embodiments, wobble base pairing (non-Watson-Crick base pairing) may result. In some embodiments, the at least one histone stem-loop sequence comprises a length of 15 to 45 nucleotides.

[0837] In other embodiments the RNA (e.g., mRNA) vaccine may have one or more AU-rich sequences removed. These sequences, sometimes referred to as AURES, are destabilizing sequences found in the 3′UTR. The AURES may be removed from the RNA (e.g., mRNA) vaccines. Alternatively the AURES may remain in the RNA (e.g., mRNA) vaccine.

### Nanoparticle Formulations

[0838] In some embodiments, tropical disease RNA (e.g. mRNA) vaccines are formulated in a nanoparticle. In some embodiments, tropical disease RNA (e.g. mRNA) vaccines are formulated in a lipid nanoparticle. In some embodiments, tropical disease RNA (e.g. mRNA) vaccines are formulated in a lipid-polycation complex, referred to as a cationic lipid nanoparticle. As a non-limiting example, the polycation may include a cationic peptide or a polypeptide such as, but not limited to, polylysine, polyornithine and/or polyarginine. In some embodiments, tropical disease RNA (e.g., mRNA) vaccines are formulated in a lipid nanoparticle that includes a non-cationic lipid such as, but not limited to, cholesterol or dioleoyl phosphatidylethanolamine (DOPE).

[0839] A lipid nanoparticle formulation may be influenced by, but not limited to, the selection of the cationic lipid component, the degree of cationic lipid saturation, the nature of the PEGylation, ratio of all components and biophysical parameters such as size. In one example by Semple et al. (Nature Biotech. 2010 28:172-176), the lipid nanoparticle formulation is composed of 57.1% cationic lipid, 7.1% dipalmitoylphosphatidylcholine, 34.3% cholesterol, and 1.4% PEG-c-DMA. As another example, changing the composition of the cationic lipid can more effectively deliver siRNA to various antigen presenting cells (Basha et al. Mol Ther. 2011 19:2186-2200).

[0840] In some embodiments, lipid nanoparticle formulations may comprise 35 to 45% cationic lipid, 40% to 50% cationic lipid, 50% to 60% cationic lipid and/or 55% to 65% cationic lipid. In some embodiments, the ratio of lipid to RNA (e.g., mRNA) in lipid nanoparticles may be 5:1 to 20:1, 10:1 to 25:1, 15:1 to 30:1 and/or at least 30:1.

[0841] In some embodiments, the ratio of PEG in the lipid nanoparticle formulations may be increased or decreased and/or the carbon chain length of the PEG lipid may be modified from C14 to C18 to alter the pharmacokinetics and/or biodistribution of the lipid nanoparticle formulations. As a non-limiting example, lipid nanoparticle formulations may contain 0.5% to 3.0%, 1.0% to 3.5%, 1.5% to 4.0%, 2.0% to 4.5%, 2.5% to 5.0% and/or 3.0% to 6.0% of the lipid molar ratio of PEG-c-DOMG (R-3-[(ω-methoxy-poly(ethyleneglycol) 2000) carbamoyl)]-1,2-dimyristyloxypropyl-3-amine) (also referred to herein as PEG-DOMG) as compared to the cationic lipid, DSPC and cholesterol. In some embodiments, the PEG-c-DOMG may be replaced with a PEG lipid such as, but not limited to, PEG-DSG (1,2-Distearoyl-sn-glycerol, methoxypolyethylene glycol), PEG-DMG (1,2-Dimyristoyl-sn-glycerol) and/or PEG-DPG (1,2-Dipalmitoyl-sn-glycerol, methoxypolyethylene glycol). The cationic lipid may be selected from any lipid known in the art such as, but not limited to, DLin-MC3-DMA, DLin-DMA, C12-200 and DLin-KC2-DMA.

[0842] In some embodiments, a tropical disease RNA (e.g. mRNA) vaccine formulation is a nanoparticle that comprises at least one lipid. The lipid may be selected from, but is not limited to, DLin-DMA, DLin-K-DMA, 98N12-5, C12-200, DLin-MC3-DMA, DLin-KC2-DMA, DODMA, PLGA, PEG, PEG-DMG, PEGylated lipids and amino alcohol lipids. In some embodiments, the lipid may be a cationic lipid such as, but not limited to, DLin-DMA, DLin-D-DMA, DLin-MC3-DMA, DLin-KC2-DMA, DODMA and amino alcohol lipids. The amino alcohol cationic lipid may be the lipids described in and/or made by the methods described in U.S. Patent Publication No. US20130150625, herein incorporated by reference in its entirety. As a non-limiting example, the cationic lipid may be 2-amino-3-[(9Z,12Z)-octadeca-9,12-dien-1-yloxy]-2-{[(9Z,2Z)-octadeca-9, 12-dien-1-yloxy]methyl}propan-1-ol (Compound 1 in US20130150625); 2-amino-3-[(9Z)-octadec-9-en-1-yloxy]-2-{[(9Z)-octadec-9-en-1-yloxy]methyl}propan-1-ol (Compound 2 in US20130150625); 2-amino-3-[(9Z,12Z)-octadeca-9,12-dien-1-yloxy]-2-[(octyloxy)methyl]propan-1-ol (Compound 3 in US20130150625); and 2-(dimethylamino)-3-[(9Z,12Z)-octadeca-9,12-dien-1-yloxy]-2-{[(9Z,12Z)-octadeca-9,12-dien-1-yloxy]methyl}propan-1-ol (Compound 4 in US20130150625); or any pharmaceutically acceptable salt or stereoisomer thereof.

[0843] Lipid nanoparticle formulations typically comprise a lipid, in particular, an ionizable cationic lipid, for example, 2,2-dilinoleyl-4-dimethylaminoethyl-[1,3]-dioxolane (DLin-KC2-DMA), dilinoleyl-methyl-4-dimethylaminobutyrate (DLin-MC3-DMA), or di((Z)-non-2-en-1-yl) 9-((4-(dimethylamino) butanoyl)oxy) heptadecanedioate (L319), and further comprise a neutral lipid, a sterol and a molecule capable of reducing particle aggregation, for example a PEG or PEG-modified lipid.

[0844] In some embodiments, a lipid nanoparticle formulation consists essentially of (i) at least one lipid selected from the group consisting of 2,2-dilinoleyl-4-dimethylaminoethyl-[1,3]-dioxolane (DLin-KC2-DMA), dilinoleyl-methyl-4-dimethylaminobutyrate (DLin-MC3-DMA), and di((Z)-non-2-en-1-yl) 9-((4-(dimethylamino) butanoyl)oxy) heptadecanedioate (L319); (ii) a neutral lipid selected from DSPC, DPPC, POPC, DOPE and SM; (iii) a sterol, e.g., cholesterol; and (iv) a PEG-lipid, e.g., PEG-DMG or PEG-cDMA, in a molar ratio of 20-60% cationic lipid:5-25% neutral lipid:25-55% sterol; 0.5-15% PEG-lipid.

[0845] In some embodiments, a lipid nanoparticle formulation includes 25% to 75% on a molar basis of a cationic lipid selected from 2,2-dilinoleyl-4-dimethylaminoethyl-[1,3]-dioxolane (DLin-KC2-DMA), dilinoleyl-methyl-4-dimethylaminobutyrate (DLin-MC3-DMA), and di((Z)-non-2-en-1-yl) 9-((4-(dimethylamino) butanoyl)oxy) heptadecanedioate (L319), e.g., 35% to 65%, 45% to 65%, 60%, 57.5%, 50% or 40% on a molar basis.

[0846] In some embodiments, a lipid nanoparticle formulation includes 0.5% to 15% on a molar basis of the neutral lipid, e.g., 3% to 12%, 5% to 10% or 15%, 10%, or 7.5% on a molar basis. Examples of neutral lipids include, without limitation, DSPC, POPC, DPPC, DOPE and SM. In some embodiments, the formulation includes 5% to 50% on a molar basis of the sterol (e.g., 15% to 45%, 20% to 40%, 40%, 38.5%, 35%, or 31% on a molar basis). A non-limiting example of a sterol is cholesterol. In some embodiments, a lipid nanoparticle formulation includes 0.5% to 20% on a molar basis of the PEG or PEG-modified lipid (e.g., 0.5% to 10%, 0.5% to 5%, 1.5%, 0.5%, 1.5%, 3.5%, or 5% on a molar basis). In some embodiments, a PEG or PEG modified lipid comprises a PEG molecule of an average molecular weight of 2,000 Da. In some embodiments, a PEG or PEG modified lipid comprises a PEG molecule of an average molecular weight of less than 2,000, for example around 1,500 Da, around 1,000 Da, or around 500 Da. Non-limiting examples of PEG-modified lipids include PEG-distearoyl glycerol (PEG-DMG) (also referred herein as PEG-C14 or C14-PEG), PEG-CDMA (further discussed in Reyes et al. J. Controlled Release, 107, 276-287 (2005) the contents of which are herein incorporated by reference in their entirety).

[0847] In some embodiments, lipid nanoparticle formulations include 25-75% of a cationic lipid selected from 2,2-dilinoleyl-4-dimethylaminoethyl-[1,3]-dioxolane (DLin-KC2-DMA), dilinoleyl-methyl-4-dimethylaminobutyrate (DLin-MC3-DMA), and di((Z)-non-2-en-1-yl) 9-((4-(dimethylamino) butanoyl)oxy) heptadecanedioate (L319), 0.5-15% of the neutral lipid, 5-50% of the sterol, and 0.5-20% of the PEG or PEG-modified lipid on a molar basis.

[0848] In some embodiments, lipid nanoparticle formulations include 35-65% of a cationic lipid selected from 2,2-dilinoleyl-4-dimethylaminoethyl-[1,3]-dioxolane (DLin-KC2-DMA), dilinoleyl-methyl-4-dimethylaminobutyrate (DLin-MC3-DMA), and di((Z)-non-2-en-1-yl) 9-((4-(dimethylamino) butanoyl)oxy) heptadecanedioate (L319), 3-12% of the neutral lipid, 15-45% of the sterol, and 0.5-10% of the PEG or PEG-modified lipid on a molar basis.

[0849] In some embodiments, lipid nanoparticle formulations include 45-65% of a cationic lipid selected from 2,2-dilinoleyl-4-dimethylaminoethyl-[1,3]-dioxolane (DLin-KC2-DMA), dilinoleyl-methyl-4-dimethylaminobutyrate (DLin-MC3-DMA), and di((Z)-non-2-en-1-yl) 9-((4-(dimethylamino) butanoyl)oxy) heptadecanedioate (L319), 5-10% of the neutral lipid, 25-40% of the sterol, and 0.5-10% of the PEG or PEG-modified lipid on a molar basis.

[0850] In some embodiments, lipid nanoparticle formulations include 60% of a cationic lipid selected from 2,2-dilinoleyl-4-dimethylaminoethyl-[1,3]-dioxolane (DLin-KC2-DMA), dilinoleyl-methyl-4-dimethylaminobutyrate (DLin-MC3-DMA), and di((Z)-non-2-en-1-yl) 9-((4-(dimethylamino) butanoyl)oxy) heptadecanedioate (L319), 7.5% of the neutral lipid, 31% of the sterol, and 1.5% of the PEG or PEG-modified lipid on a molar basis.

[0851] In some embodiments, lipid nanoparticle formulations include 50% of a cationic lipid selected from 2,2-dilinoleyl-4-dimethylaminoethyl-[1,3]-dioxolane (DLin-KC2-DMA), dilinoleyl-methyl-4-dimethylaminobutyrate (DLin-MC3-DMA), and di((Z)-non-2-en-1-yl) 9-((4-(dimethylamino) butanoyl)oxy) heptadecanedioate (L319), 10% of the neutral lipid, 38.5% of the sterol, and 1.5% of the PEG or PEG-modified lipid on a molar basis.

[0852] In some embodiments, lipid nanoparticle formulations include 50% of a cationic lipid selected from 2,2-dilinoleyl-4-dimethylaminoethyl-[1,3]-dioxolane (DLin-KC2-DMA), dilinoleyl-methyl-4-dimethylaminobutyrate (DLin-MC3-DMA), and di((Z)-non-2-en-1-yl) 9-((4-(dimethylamino) butanoyl)oxy) heptadecanedioate (L319), 10% of the neutral lipid, 35% of the sterol, 4.5% or 5% of the PEG or PEG-modified lipid, and 0.5% of the targeting lipid on a molar basis.

[0853] In some embodiments, lipid nanoparticle formulations include 40% of a cationic lipid selected from 2,2-dilinoleyl-4-dimethylaminoethyl-[1,3]-dioxolane (DLin-KC2-DMA), dilinoleyl-methyl-4-dimethylaminobutyrate (DLin-MC3-DMA), and di((Z)-non-2-en-1-yl) 9-((4-(dimethylamino) butanoyl)oxy) heptadecanedioate (L319), 15% of the neutral lipid, 40% of the sterol, and 5% of the PEG or PEG-modified lipid on a molar basis.

[0854] In some embodiments, lipid nanoparticle formulations include 57.2% of a cationic lipid selected from 2,2-dilinoleyl-4-dimethylaminoethyl-[1,3]-dioxolane (DLin-KC2-DMA), dilinoleyl-methyl-4-dimethylaminobutyrate (DLin-MC3-DMA), and di((Z)-non-2-en-1-yl) 9-((4-(dimethylamino) butanoyl)oxy) heptadecanedioate (L319), 7.1% of the neutral lipid, 34.3% of the sterol, and 1.4% of the PEG or PEG-modified lipid on a molar basis.

[0855] In some embodiments, lipid nanoparticle formulations include 57.5% of a cationic lipid selected from the PEG lipid is PEG-CDMA (PEG-CDMA is further discussed in Reyes et al. (J. Controlled Release, 107, 276-287 (2005), the contents of which are herein incorporated by reference in their entirety), 7.5% of the neutral lipid, 31.5% of the sterol, and 3.5% of the PEG or PEG-modified lipid on a molar basis.

[0856] In some embodiments, lipid nanoparticle formulations consist essentially of a lipid mixture in molar ratios of 20-70% cationic lipid:5-45% neutral lipid:20-55% cholesterol:0.5-15% PEG-modified lipid. In some embodiments, lipid nanoparticle formulations consist essentially of a lipid mixture in a molar ratio of 20-60% cationic lipid:5-25% neutral lipid:25-55% cholesterol:0.5-15% PEG-modified lipid.

[0857] In some embodiments, the molar lipid ratio is 50/10/38.5/1.5 (mol % cationic lipid/neutral lipid, e.g., DSPC/Chol/PEG-modified lipid, e.g., PEG-DMG, PEG-DSG or PEG-DPG), 57.2/7.1134.3/1.4 (mol % cationic lipid/neutral lipid, e.g., DPPC/Chol/PEG-modified lipid, e.g., PEG-cDMA), 40/15/40/5 (mol % cationic lipid/neutral lipid, e.g., DSPC/Chol/PEG-modified lipid, e.g., PEG-DMG), 50/10/35/4.5/0.5 (mol % cationic lipid/neutral lipid, e.g., DSPC/Chol/PEG-modified lipid, e.g., PEG-DSG), 50/10/35/5 (cationic lipid/neutral lipid, e.g., DSPC/Chol/PEG-modified lipid, e.g., PEG-DMG), 40/10/40/10 (mol % cationic lipid/neutral lipid, e.g., DSPC/Chol/PEG-modified lipid, e.g., PEG-DMG or PEG-cDMA), 35/15/40/10 (mol % cationic lipid/neutral lipid, e.g., DSPC/Chol/PEG-modified lipid, e.g., PEG-DMG or PEG-cDMA) or 52/13/30/5 (mol % cationic lipid/neutral lipid, e.g., DSPC/Chol/PEG-modified lipid, e.g., PEG-DMG or PEG-cDMA).

[0858] Non-limiting examples of lipid nanoparticle compositions and methods of making them are described, for example, in Semple et al. (2010) Nat. Biotechnol. 28:172-176; Jayarama et al. (2012), Angew. Chem. Int. Ed., 51:8529-8533; and Maier et al. (2013) Molecular Therapy 21, 1570-1578 (the contents of each of which are incorporated herein by reference in their entirety).

[0859] In some embodiments, lipid nanoparticle formulations may comprise a cationic lipid, a PEG lipid and a structural lipid and optionally comprise a non-cationic lipid. As a non-limiting example, a lipid nanoparticle may comprise 40-60% of cationic lipid, 5-15% of a non-cationic lipid, 1-2% of a PEG lipid and 30-50% of a structural lipid. As another non-limiting example, the lipid nanoparticle may comprise 50% cationic lipid, 10% non-cationic lipid, 1.5% PEG lipid and 38.5% structural lipid. As yet another non-limiting example, a lipid nanoparticle may comprise 55% cationic lipid, 10% non-cationic lipid, 2.5% PEG lipid and 32.5% structural lipid. In some embodiments, the cationic lipid may be any cationic lipid described herein such as, but not limited to, DLin-KC2-DMA, DLin-MC3-DMA and L319.

[0860] In some embodiments, the lipid nanoparticle formulations described herein may be 4 component lipid nanoparticles. The lipid nanoparticle may comprise a cationic lipid, a non-cationic lipid, a PEG lipid and a structural lipid. As a non-limiting example, the lipid nanoparticle may comprise 40-60% of cationic lipid, 5-15% of a non-cationic lipid, 1-2% of a PEG lipid and 30-50% of a structural lipid. As another non-limiting example, the lipid nanoparticle may comprise 50% cationic lipid, 10% non-cationic lipid, 1.5% PEG lipid and 38.5% structural lipid. As yet another non-limiting example, the lipid nanoparticle may comprise 55% cationic lipid, 10% non-cationic lipid, 2.5% PEG lipid and 32.5% structural lipid. In some embodiments, the cationic lipid may be any cationic lipid described herein such as, but not limited to, DLin-KC2-DMA, DLin-MC3-DMA and L319.

[0861] In some embodiments, the lipid nanoparticle formulations described herein may comprise a cationic lipid, a non-cationic lipid, a PEG lipid and a structural lipid. As a non-limiting example, the lipid nanoparticle comprises 50% of the cationic lipid DLin-KC2-DMA, 10% of the non-cationic lipid DSPC, 1.5% of the PEG lipid PEG-DOMG and 38.5% of the structural lipid cholesterol. As a non-limiting example, the lipid nanoparticle comprises 50% of the cationic lipid DLin-MC3-DMA, 10% of the non-cationic lipid DSPC, 1.5% of the PEG lipid PEG-DOMG and 38.5% of the structural lipid cholesterol. As a non-limiting example, the lipid nanoparticle comprises 50% of the cationic lipid DLin-MC3-DMA, 10% of the non-cationic lipid DSPC, 1.5% of the PEG lipid PEG-DMG and 38.5% of the structural lipid cholesterol. As yet another non-limiting example, the lipid nanoparticle comprises 55% of the cationic lipid L319, 10% of the non-cationic lipid DSPC, 2.5% of the PEG lipid PEG-DMG and 32.5% of the structural lipid cholesterol.

[0862] Relative amounts of the active ingredient, the pharmaceutically acceptable excipient, and/or any additional ingredients in a vaccine composition may vary, depending upon the identity, size, and/or condition of the subject being treated and further depending upon the route by which the composition is to be administered. For example, the composition may comprise between 0.1% and 99% (w/w) of the active ingredient. By way of example, the composition may comprise between 0.1% and 100%, e.g., between 0.5% and 50%, between 1-30%, between 5-80%, at least 80% (w/w) active ingredient.

[0863] In some embodiments, the tropical disease RNA (e.g. mRNA) vaccine composition may comprise the polynucleotide described herein, formulated in a lipid nanoparticle comprising MC3, Cholesterol, DSPC and PEG2000-DMG, the buffer trisodium citrate, sucrose and water for injection. As a non-limiting example, the composition comprises: 2.0 mg/mL of drug substance, 21.8 mg/mL of MC3, 10.1 mg/mL of cholesterol, 5.4 mg/mL of DSPC, 2.7 mg/mL of PEG2000-DMG, 5.16 mg/mL of trisodium citrate, 71 mg/mL of sucrose and 1.0 mL of water for injection.

[0864] In some embodiments, a nanoparticle (e.g., a lipid nanoparticle) has a mean diameter of 10-500 nm, 20-400 nm, 30-300 nm, or 40-200 nm. In some embodiments, a nanoparticle (e.g., a lipid nanoparticle) has a mean diameter of 50-150 nm, 50-200 nm, 80-100 nm or 80-200 nm.

### Liposomes, Lipoplexes, and Lipid Nanoparticles

[0865] The RNA (e.g., mRNA) vaccines of the disclosure can be formulated using one or more liposomes, lipoplexes, or lipid nanoparticles. In some embodiments, pharmaceutical compositions of RNA (e.g., mRNA) vaccines include liposomes. Liposomes are artificially-prepared vesicles which may primarily be composed of a lipid bilayer and may be used as a delivery vehicle for the administration of nutrients and pharmaceutical formulations. Liposomes can be of different sizes such as, but not limited to, a multilamellar vesicle (MLV) which may be hundreds of nanometers in diameter and may contain a series of concentric bilayers separated by narrow aqueous compartments, a small unicellular vesicle (SUV) which may be smaller than 50 nm in diameter, and a large unilamellar vesicle (LUV) which may be between 50 and 500 nm in diameter. Liposome design may include, but is not limited to, opsonins or ligands in order to improve the attachment of liposomes to unhealthy tissue or to activate events such as, but not limited to, endocytosis. Liposomes may contain a low or a high pH in order to improve the delivery of the pharmaceutical formulations.

[0866] The formation of liposomes may depend on the physicochemical characteristics such as, but not limited to, the pharmaceutical formulation entrapped and the liposomal ingredients, the nature of the medium in which the lipid vesicles are dispersed, the effective concentration of the entrapped substance and its potential toxicity, any additional processes involved during the application and/or delivery of the vesicles, the optimization size, polydispersity and the shelf-life of the vesicles for the intended application, and the batch-to-batch reproducibility and possibility of large-scale production of safe and efficient liposomal products.

[0867] In some embodiments, pharmaceutical compositions described herein may include, without limitation, liposomes such as those formed from 1,2-dioleyloxy-N,N-dimethylaminopropane (DODMA) liposomes, DiLa2 liposomes from Marina Biotech (Bothell, WA), 1,2-dilinoleyloxy-3-dimethylaminopropane (DLin-DMA), 2,2-dilinoleyl-4-(2-dimethylaminoethyl)-[1,3]-dioxolane (DLin-KC2-DMA), and MC3 (US20100324120; herein incorporated by reference in its entirety) and liposomes which may deliver small molecule drugs such as, but not limited to, DOXIL® from Janssen Biotech, Inc. (Horsham, PA).

[0868] In some embodiments, pharmaceutical compositions described herein may include, without limitation, liposomes such as those formed from the synthesis of stabilized plasmid-lipid particles (SPLP) or stabilized nucleic acid lipid particle (SNALP) that have been previously described and shown to be suitable for oligonucleotide delivery in vitro and in vivo (see Wheeler et al. Gene Therapy. 1999 6:271-281; Zhang et al. Gene Therapy. 1999 6:1438-1447; Jeffs et al. Pharm Res. 2005 22:362-372; Morrissey et al., Nat Biotechnol. 2005 2:1002-1007; Zimmermann et al., Nature. 2006 441:111-114; Heyes et al. J Contr Rel. 2005 107:276-287; Semple et al. Nature Biotech. 2010 28:172-176; Judge et al. J Clin Invest. 2009 119:661-673; deFougerolles Hum Gene Ther. 2008 19:125-132; U.S. Patent Publication No US20130122104; all of which are incorporated herein in their entireties). The original manufacture method by Wheeler et al. was a detergent dialysis method, which was later improved by Jeffs et al. and is referred to as the spontaneous vesicle formation method. The liposome formulations are composed of 3 to 4 lipid components in addition to the polynucleotide. As an example a liposome can contain, but is not limited to, 55% cholesterol, 20% disteroylphosphatidyl choline (DSPC), 10% PEG-S-DSG, and 15% 1,2-dioleyloxy-N,N-dimethylaminopropane (DODMA), as described by Jeffs et al. As another example, certain liposome formulations may contain, but are not limited to, 48% cholesterol, 20% DSPC, 2% PEG-c-DMA, and 30% cationic lipid, where the cationic lipid can be 1,2-distearloxy-N,N-dimethylaminopropane (DSDMA), DODMA, DLin-DMA, or 1,2-dilinolenyloxy-3-dimethylaminopropane (DLenDMA), as described by Heyes et al.

[0869] In some embodiments, liposome formulations may comprise from about 25.0% cholesterol to about 40.0% cholesterol, from about 30.0% cholesterol to about 45.0% cholesterol, from about 35.0% cholesterol to about 50.0% cholesterol and/or from about 48.5% cholesterol to about 60% cholesterol. In some embodiments, formulations may comprise a percentage of cholesterol selected from the group consisting of 28.5%, 31.5%, 33.5%, 36.5%, 37.0%, 38.5%, 39.0% and 43.5%. In some embodiments, formulations may comprise from about 5.0% to about 10.0% DSPC and/or from about 7.0% to about 15.0% DSPC.

[0870] In some embodiments, the RNA (e.g., mRNA) vaccine pharmaceutical compositions may be formulated in liposomes such as, but not limited to, DiLa2 liposomes (Marina Biotech, Bothell, WA), SMARTICLES® (Marina Biotech, Bothell, WA), neutral DOPC (1,2-dioleoyl-sn-glycero-3-phosphocholine) based liposomes (e.g., siRNA delivery for ovarian cancer (Landen et al. Cancer Biology & Therapy 2006 5 (12) 1708-1713); herein incorporated by reference in its entirety) and hyaluronan-coated liposomes (Quiet Therapeutics, Israel).

[0871] In some embodiments, the cationic lipid may be a low molecular weight cationic lipid such as those described in U.S. Patent Application No. 20130090372, the contents of which are herein incorporated by reference in their entirety.

[0872] In some embodiments, the RNA (e.g., mRNA) vaccines may be formulated in a lipid vesicle, which may have crosslinks between functionalized lipid bilayers.

[0873] In some embodiments, the RNA (e.g., mRNA) vaccines may be formulated in a lipid-polycation complex. The formation of the lipid-polycation complex may be accomplished by methods known in the art and/or as described in U.S. Pub. No. 20120178702, herein incorporated by reference in its entirety. As a non-limiting example, the polycation may include a cationic peptide or a polypeptide such as, but not limited to, polylysine, polyornithine and/or polyarginine. In some embodiments, the RNA (e.g., mRNA) vaccines may be formulated in a lipid-polycation complex, which may further include a non-cationic lipid such as, but not limited to, cholesterol or dioleoyl phosphatidylethanolamine (DOPE).

[0874] In some embodiments, the ratio of PEG in the lipid nanoparticle (LNP) formulations may be increased or decreased and/or the carbon chain length of the PEG lipid may be modified from C14 to C18 to alter the pharmacokinetics and/or biodistribution of the LNP formulations. As a non-limiting example, LNP formulations may contain from about 0.5% to about 3.0%, from about 1.0% to about 3.5%, from about 1.5% to about 4.0%, from about 2.0% to about 4.5%, from about 2.5% to about 5.0% and/or from about 3.0% to about 6.0% of the lipid molar ratio of PEG-c-DOMG (R-3-[(ω-methoxy-poly(ethyleneglycol) 2000) carbamoyl)]-1,2-dimyristyloxypropyl-3-amine) (also referred to herein as PEG-DOMG) as compared to the cationic lipid, DSPC and cholesterol. In some embodiments, the PEG-c-DOMG may be replaced with a PEG lipid such as, but not limited to, PEG-DSG (1,2-Distearoyl-sn-glycerol, methoxypolyethylene glycol), PEG-DMG (1,2-Dimyristoyl-sn-glycerol) and/or PEG-DPG (1,2-Dipalmitoyl-sn-glycerol, methoxypolyethylene glycol). The cationic lipid may be selected from any lipid known in the art such as, but not limited to, DLin-MC3-DMA, DLin-DMA, C12-200 and DLin-KC2-DMA.

[0875] In some embodiments, the RNA (e.g., mRNA) vaccines may be formulated in a lipid nanoparticle.

[0876] In some embodiments, the RNA (e.g., mRNA) vaccine formulation comprising the polynucleotide is a nanoparticle which may comprise at least one lipid. The lipid may be selected from, but is not limited to, DLin-DMA, DLin-K-DMA, 98N12-5, C12-200, DLin-MC3-DMA, DLin-KC2-DMA, DODMA, PLGA, PEG, PEG-DMG, PEGylated lipids and amino alcohol lipids. In another aspect, the lipid may be a cationic lipid such as, but not limited to, DLin-DMA, DLin-D-DMA, DLin-MC3-DMA, DLin-KC2-DMA, DODMA and amino alcohol lipids. The amino alcohol cationic lipid may be the lipids described in and/or made by the methods described in U.S. Patent Publication No. US20130150625, herein incorporated by reference in its entirety. As a non-limiting example, the cationic lipid may be 2-amino-3-[(9Z,12Z)-octadeca-9,12-dien-1-yloxy]-2-{[(9Z,2Z)-octadeca-9,12-dien-1-yloxy]methyl}propan-1-ol (Compound 1 in US20130150625); 2-amino-3-[(9Z)-octadec-9-en-1-yloxy]-2-{[(9Z)-octadec-9-en-1-yloxy]methyl}propan-1-ol (Compound 2 in US20130150625); 2-amino-3-[(9Z,12Z)-octadeca-9, 12-dien-1-yloxy]-2-[(octyloxy)methyl]propan-1-ol (Compound 3 in US20130150625); and 2-(dimethylamino)-3-[(9Z,12Z)-octadeca-9,12-dien-1-yloxy]-2-{[(9Z,12Z)-octadeca-9, 12-dien-1-yloxy]methyl}propan-1-ol (Compound 4 in US20130150625); or any pharmaceutically acceptable salt or stereoisomer thereof.

[0877] Lipid nanoparticle formulations typically comprise a lipid, in particular, an ionizable cationic lipid, for example, 2,2-dilinoleyl-4-dimethylaminoethyl-[1,3]-dioxolane (DLin-KC2-DMA), dilinoleyl-methyl-4-dimethylaminobutyrate (DLin-MC3-DMA), or di((Z)-non-2-en-1-yl) 9-((4-(dimethylamino) butanoyl)oxy) heptadecanedioate (L319), and further comprise a neutral lipid, a sterol and a molecule capable of reducing particle aggregation, for example a PEG or PEG-modified lipid.

[0878] In some embodiments, the lipid nanoparticle formulation consists essentially of (i) at least one lipid selected from the group consisting of 2,2-dilinoleyl-4-dimethylaminoethyl-[1,3]-dioxolane (DLin-KC2-DMA), dilinoleyl-methyl-4-dimethylaminobutyrate (DLin-MC3-DMA), and di((Z)-non-2-en-1-yl) 9-((4-(dimethylamino) butanoyl)oxy) heptadecanedioate (L319); (ii) a neutral lipid selected from DSPC, DPPC, POPC, DOPE and SM; (iii) a sterol, e.g., cholesterol; and (iv) a PEG-lipid, e.g., PEG-DMG or PEG-cDMA, in a molar ratio of about 20-60% cationic lipid:5-25% neutral lipid:25-55% sterol; 0.5-15% PEG-lipid.

[0879] In some embodiments, the formulation includes from about 25% to about 75% on a molar basis of a cationic lipid selected from 2,2-dilinoleyl-4-dimethylaminoethyl-[1,3]-dioxolane (DLin-KC2-DMA), dilinoleyl-methyl-4-dimethylaminobutyrate (DLin-MC3-DMA), and di((Z)-non-2-en-1-yl) 9-((4-(dimethylamino) butanoyl)oxy) heptadecanedioate (L319), e.g., from about 35 to about 65%, from about 45 to about 65%, about 60%, about 57.5%, about 50% or about 40% on a molar basis.

[0880] In some embodiments, the formulation includes from about 0.5% to about 15% on a molar basis of the neutral lipid e.g., from about 3 to about 12%, from about 5 to about 10% or about 15%, about 10%, or about 7.5% on a molar basis. Examples of neutral lipids include, but are not limited to, DSPC, POPC, DPPC, DOPE and SM. In some embodiments, the formulation includes from about 5% to about 50% on a molar basis of the sterol (e.g., about 15 to about 45%, about 20 to about 40%, about 40%, about 38.5%, about 35%, or about 31% on a molar basis. An exemplary sterol is cholesterol. In some embodiments, the formulation includes from about 0.5% to about 20% on a molar basis of the PEG or PEG-modified lipid (e.g., about 0.5 to about 10%, about 0.5 to about 5%, about 1.5%, about 0.5%, about 1.5%, about 3.5%, or about 5% on a molar basis). In some embodiments, the PEG or PEG modified lipid comprises a PEG molecule of an average molecular weight of 2,000 Da. In other embodiments, the PEG or PEG modified lipid comprises a PEG molecule of an average molecular weight of less than 2,000, for example around 1,500 Da, around 1,000 Da, or around 500 Da. Examples of PEG-modified lipids include, but are not limited to, PEG-distearoyl glycerol (PEG-DMG) (also referred herein as PEG-C14 or C14-PEG), PEG-CDMA (further discussed in Reyes et al. J. Controlled Release, 107, 276-287 (2005) the contents of which are herein incorporated by reference in their entirety)

[0881] In some embodiments, the formulations of the present disclosure include 25-75% of a cationic lipid selected from 2,2-dilinoleyl-4-dimethylaminoethyl-[1,3]-dioxolane (DLin-KC2-DMA), dilinoleyl-methyl-4-dimethylaminobutyrate (DLin-MC3-DMA), and di((Z)-non-2-en-1-yl) 9-((4-(dimethylamino) butanoyl)oxy) heptadecanedioate (L319), 0.5-15% of the neutral lipid, 5-50% of the sterol, and 0.5-20% of the PEG or PEG-modified lipid on a molar basis.

[0882] In some embodiments, the formulations of the present disclosure include 35-65% of a cationic lipid selected from 2,2-dilinoleyl-4-dimethylaminoethyl-[1,3]-dioxolane (DLin-KC2-DMA), dilinoleyl-methyl-4-dimethylaminobutyrate (DLin-MC3-DMA), and di((Z)-non-2-en-1-yl) 9-((4-(dimethylamino) butanoyl)oxy) heptadecanedioate (L319), 3-12% of the neutral lipid, 15-45% of the sterol, and 0.5-10% of the PEG or PEG-modified lipid on a molar basis.

[0883] In some embodiments, the formulations of the present disclosure include 45-65% of a cationic lipid selected from 2,2-dilinoleyl-4-dimethylaminoethyl-[1,3]-dioxolane (DLin-KC2-DMA), dilinoleyl-methyl-4-dimethylaminobutyrate (DLin-MC3-DMA), and di((Z)-non-2-en-1-yl) 9-((4-(dimethylamino) butanoyl)oxy) heptadecanedioate (L319), 5-10% of the neutral lipid, 25-40% of the sterol, and 0.5-10% of the PEG or PEG-modified lipid on a molar basis.

[0884] In some embodiments, the formulations of the present disclosure include about 60% of a cationic lipid selected from 2,2-dilinoleyl-4-dimethylaminoethyl-[1,3]-dioxolane (DLin-KC2-DMA), dilinoleyl-methyl-4-dimethylaminobutyrate (DLin-MC3-DMA), and di((Z)-non-2-en-1-yl) 9-((4-(dimethylamino) butanoyl)oxy) heptadecanedioate (L319), about 7.5% of the neutral lipid, about 31% of the sterol, and about 1.5% of the PEG or PEG-modified lipid on a molar basis.

[0885] In some embodiments, the formulations of the present disclosure include about 50% of a cationic lipid selected from 2,2-dilinoleyl-4-dimethylaminoethyl-[1,3]-dioxolane (DLin-KC2-DMA), dilinoleyl-methyl-4-dimethylaminobutyrate (DLin-MC3-DMA), and di((Z)-non-2-en-1-yl) 9-((4-(dimethylamino) butanoyl)oxy) heptadecanedioate (L319), about 10% of the neutral lipid, about 38.5% of the sterol, and about 1.5% of the PEG or PEG-modified lipid on a molar basis.

[0886] In some embodiments, the formulations of the present disclosure include about 50% of a cationic lipid selected from 2,2-dilinoleyl-4-dimethylaminoethyl-[1,3]-dioxolane (DLin-KC2-DMA), dilinoleyl-methyl-4-dimethylaminobutyrate (DLin-MC3-DMA), and di((Z)-non-2-en-1-yl) 9-((4-(dimethylamino) butanoyl)oxy) heptadecanedioate (L319), about 10% of the neutral lipid, about 35% of the sterol, about 4.5% or about 5% of the PEG or PEG-modified lipid, and about 0.5% of the targeting lipid on a molar basis.

[0887] In some embodiments, the formulations of the present disclosure include about 40% of a cationic lipid selected from 2,2-dilinoleyl-4-dimethylaminoethyl-[1,3]-dioxolane (DLin-KC2-DMA), dilinoleyl-methyl-4-dimethylaminobutyrate (DLin-MC3-DMA), and di((Z)-non-2-en-1-yl) 9-((4-(dimethylamino) butanoyl)oxy) heptadecanedioate (L319), about 15% of the neutral lipid, about 40% of the sterol, and about 5% of the PEG or PEG-modified lipid on a molar basis.

[0888] In some embodiments, the formulations of the present disclosure include about 57.2% of a cationic lipid selected from 2,2-dilinoleyl-4-dimethylaminoethyl-[1,3]-dioxolane (DLin-KC2-DMA), dilinoleyl-methyl-4-dimethylaminobutyrate (DLin-MC3-DMA), and di((Z)-non-2-en-1-yl) 9-((4-(dimethylamino) butanoyl)oxy) heptadecanedioate (L319), about 7.1% of the neutral lipid, about 34.3% of the sterol, and about 1.4% of the PEG or PEG-modified lipid on a molar basis.

[0889] In some embodiments, the formulations of the present disclosure include about 57.5% of a cationic lipid selected from the PEG lipid is PEG-CDMA (PEG-CDMA is further discussed in Reyes et al. (J. Controlled Release, 107, 276-287 (2005), the contents of which are herein incorporated by reference in their entirety), about 7.5% of the neutral lipid, about 31.5% of the sterol, and about 3.5% of the PEG or PEG-modified lipid on a molar basis.

[0890] In some embodiments, lipid nanoparticle formulation consists essentially of a lipid mixture in molar ratios of about 20-70% cationic lipid: 5-45% neutral lipid: 20-55% cholesterol: 0.5-15% PEG-modified lipid; more preferably in a molar ratio of about 20-60% cationic lipid:5-25% neutral lipid:25-55% cholesterol:0.5-15% PEG-modified lipid.

[0891] In some embodiments, the molar lipid ratio is approximately 50/10/38.5/1.5 (mol % cationic lipid/neutral lipid, e.g., DSPC/Chol/PEG-modified lipid, e.g., PEG-DMG, PEG-DSG or PEG-DPG), 57.2/7.1134.3/1.4 (mol % cationic lipid/neutral lipid, e.g., DPPC/Chol/PEG-modified lipid, e.g., PEG-cDMA), 40/15/40/5 (mol % cationic lipid/neutral lipid, e.g., DSPC/Chol/PEG-modified lipid, e.g., PEG-DMG), 50/10/35/4.5/0.5 (mol % cationic lipid/neutral lipid, e.g., DSPC/Chol/PEG-modified lipid, e.g., PEG-DSG), 50/10/35/5 (cationic lipid/neutral lipid, e.g., DSPC/Chol/PEG-modified lipid, e.g., PEG-DMG), 40/10/40/10 (mol % cationic lipid/neutral lipid, e.g., DSPC/Chol/PEG-modified lipid, e.g., PEG-DMG or PEG-cDMA), 35/15/40/10 (mol % cationic lipid/neutral lipid, e.g., DSPC/Chol/PEG-modified lipid, e.g., PEG-DMG or PEG-cDMA) or 52/13/30/5 (mol % cationic lipid/neutral lipid, e.g., DSPC/Chol/PEG-modified lipid, e.g., PEG-DMG or PEG-cDMA).

[0892] Examples of lipid nanoparticle compositions and methods of making same are described, for example, in Semple et al. (2010) Nat. Biotechnol. 28:172-176; Jayarama et al. (2012), Angew. Chem. Int. Ed., 51:8529-8533; and Maier et al. (2013) Molecular Therapy 21, 1570-1578 (the contents of each of which are incorporated herein by reference in their entirety).

[0893] In some embodiments, the LNP formulations of the RNA (e.g., mRNA) vaccines may contain PEG-c-DOMG at 3% lipid molar ratio. In some embodiments, the LNP formulations of the RNA (e.g., mRNA) vaccines may contain PEG-c-DOMG at 1.5% lipid molar ratio.

[0894] In some embodiments, the pharmaceutical compositions of the RNA (e.g., mRNA) vaccines may include at least one of the PEGylated lipids described in International Publication No. WO2012099755, the contents of which are herein incorporated by reference in their entirety.

[0895] In some embodiments, the LNP formulation may contain PEG-DMG 2000 (1,2-dimyristoyl-sn-glycero-3-phophoethanolamine-N-[methoxy (polyethylene glycol)-2000). In some embodiments, the LNP formulation may contain PEG-DMG 2000, a cationic lipid known in the art and at least one other component. In some embodiments, the LNP formulation may contain PEG-DMG 2000, a cationic lipid known in the art, DSPC and cholesterol. As a non-limiting example, the LNP formulation may contain PEG-DMG 2000, DLin-DMA, DSPC and cholesterol. As another non-limiting example the LNP formulation may contain PEG-DMG 2000, DLin-DMA, DSPC and cholesterol in a molar ratio of 2:40:10:48 (see e.g., Geall et al., Nonviral delivery of self-amplifying RNA (e.g., mRNA) vaccines, PNAS 2012; PMID: 22908294, the contents of each of which are herein incorporated by reference in their entirety).

[0896] The lipid nanoparticles described herein may be made in a sterile environment.

[0897] In some embodiments, the LNP formulation may be formulated in a nanoparticle such as a nucleic acid-lipid particle. As a non-limiting example, the lipid particle may comprise one or more active agents or therapeutic agents; one or more cationic lipids comprising from about 50 mol % to about 85 mol % of the total lipid present in the particle; one or more non-cationic lipids comprising from about 13 mol % to about 49.5 mol % of the total lipid present in the particle; and one or more conjugated lipids that inhibit aggregation of particles comprising from about 0.5 mol % to about 2 mol % of the total lipid present in the particle.

[0898] The nanoparticle formulations may comprise a phosphate conjugate. The phosphate conjugate may increase in vivo circulation times and/or increase the targeted delivery of the nanoparticle. As a non-limiting example, the phosphate conjugates may include a compound of any one of the formulas described in International Application No. WO2013033438, the contents of which are herein incorporated by reference in its entirety.

[0899] The nanoparticle formulation may comprise a polymer conjugate. The polymer conjugate may be a water-soluble conjugate. The polymer conjugate may have a structure as described in U.S. patent application No. 20130059360, the contents of which are herein incorporated by reference in its entirety. In some embodiments, polymer conjugates with the polynucleotides of the present disclosure may be made using the methods and/or segmented polymeric reagents described in U.S. patent application No. 20130072709, the contents of which are herein incorporated by reference in its entirety. In some embodiments, the polymer conjugate may have pendant side groups comprising ring moieties such as, but not limited to, the polymer conjugates described in U.S. Patent Publication No. US20130196948, the contents which are herein incorporated by reference in its entirety.

[0900] The nanoparticle formulations may comprise a conjugate to enhance the delivery of nanoparticles of the present disclosure in a subject. Further, the conjugate may inhibit phagocytic clearance of the nanoparticles in a subject. In one aspect, the conjugate may be a “self” peptide designed from the human membrane protein CD47 (e.g., the “self” particles described by Rodriguez et al. (Science 2013 339, 971-975), herein incorporated by reference in its entirety). As shown by Rodriguez et al., the self peptides delayed macrophage-mediated clearance of nanoparticles which enhanced delivery of the nanoparticles. In another aspect, the conjugate may be the membrane protein CD47 (e.g., see Rodriguez et al. Science 2013 339, 971-975, herein incorporated by reference in its entirety). Rodriguez et al. showed that, similarly to “self” peptides, CD47 can increase the circulating particle ratio in a subject as compared to scrambled peptides and PEG coated nanoparticles.

[0901] In some embodiments, the RNA (e.g., mRNA) vaccines of the present disclosure are formulated in nanoparticles which comprise a conjugate to enhance the delivery of the nanoparticles of the present disclosure in a subject. The conjugate may be the CD47 membrane or the conjugate may be derived from the CD47 membrane protein, such as the “self” peptide described previously. In some embodiments, the nanoparticle may comprise PEG and a conjugate of CD47 or a derivative thereof. In some embodiments, the nanoparticle may comprise both the “self” peptide described above and the membrane protein CD47.

[0902] In some embodiments, a “self” peptide and/or CD47 protein may be conjugated to a virus-like particle or pseudovirion, as described herein for delivery of the RNA (e.g., mRNA) vaccines of the present disclosure.

[0903] In some embodiments, RNA (e.g., mRNA) vaccine pharmaceutical compositions comprising the polynucleotides of the present disclosure and a conjugate that may have a degradable linkage. Non-limiting examples of conjugates include an aromatic moiety comprising an ionizable hydrogen atom, a spacer moiety, and a water-soluble polymer. As a non-limiting example, pharmaceutical compositions comprising a conjugate with a degradable linkage and methods for delivering such pharmaceutical compositions are described in U.S. Patent Publication No. US20130184443, the contents of which are herein incorporated by reference in their entirety.

[0904] The nanoparticle formulations may be a carbohydrate nanoparticle comprising a carbohydrate carrier and a RNA (e.g., mRNA) vaccine. As a non-limiting example, the carbohydrate carrier may include, but is not limited to, an anhydride-modified phytoglycogen or glycogen-type material, phytoglycogen octenyl succinate, phytoglycogen beta-dextrin, anhydride-modified phytoglycogen beta-dextrin. (See e.g., International Publication No. WO2012109121; the contents of which are herein incorporated by reference in their entirety).

[0905] Nanoparticle formulations of the present disclosure may be coated with a surfactant or polymer in order to improve the delivery of the particle. In some embodiments, the nanoparticle may be coated with a hydrophilic coating such as, but not limited to, PEG coatings and/or coatings that have a neutral surface charge. The hydrophilic coatings may help to deliver nanoparticles with larger payloads such as, but not limited to, RNA (e.g., mRNA) vaccines within the central nervous system. As a non-limiting example nanoparticles comprising a hydrophilic coating and methods of making such nanoparticles are described in U.S. Patent Publication No. US20130183244, the contents of which are herein incorporated by reference in their entirety.

[0906] In some embodiments, the lipid nanoparticles of the present disclosure may be hydrophilic polymer particles. Non-limiting examples of hydrophilic polymer particles and methods of making hydrophilic polymer particles are described in U.S. Patent Publication No. US20130210991, the contents of which are herein incorporated by reference in their entirety.

[0907] In some embodiments, the lipid nanoparticles of the present disclosure may be hydrophobic polymer particles.

[0908] Lipid nanoparticle formulations may be improved by replacing the cationic lipid with a biodegradable cationic lipid which is known as a rapidly eliminated lipid nanoparticle (reLNP). Ionizable cationic lipids, such as, but not limited to, DLinDMA, DLin-KC2-DMA, and DLin-MC3-DMA, have been shown to accumulate in plasma and tissues over time and may be a potential source of toxicity. The rapid metabolism of the rapidly eliminated lipids can improve the tolerability and therapeutic index of the lipid nanoparticles by an order of magnitude from a 1 mg/kg dose to a 10 mg/kg dose in rat. Inclusion of an enzymatically degraded ester linkage can improve the degradation and metabolism profile of the cationic component, while still maintaining the activity of the reLNP formulation. The ester linkage can be internally located within the lipid chain or it may be terminally located at the terminal end of the lipid chain. The internal ester linkage may replace any carbon in the lipid chain.

[0909] In some embodiments, the internal ester linkage may be located on either side of the saturated carbon.

[0910] In some embodiments, an immune response may be elicited by delivering a lipid nanoparticle which may include a nanospecies, a polymer and an immunogen. (U.S. Publication No. 20120189700 and International Publication No. WO2012099805; each of which is herein incorporated by reference in their entirety). The polymer may encapsulate the nanospecies or partially encapsulate the nanospecies. The immunogen may be a recombinant protein, a modified RNA and/or a polynucleotide described herein. In some embodiments, the lipid nanoparticle may be formulated for use in a vaccine such as, but not limited to, against a pathogen.

[0911] Lipid nanoparticles may be engineered to alter the surface properties of particles so the lipid nanoparticles may penetrate the mucosal barrier. Mucus is located on mucosal tissue such as, but not limited to, oral (e.g., the buccal and esophageal membranes and tonsil tissue), ophthalmic, gastrointestinal (e.g., stomach, small intestine, large intestine, colon, rectum), nasal, respiratory (e.g., nasal, pharyngeal, tracheal and bronchial membranes), genital (e.g., vaginal, cervical and urethral membranes). Nanoparticles larger than 10-200 nm which are preferred for higher drug encapsulation efficiency and the ability to provide the sustained delivery of a wide array of drugs have been thought to be too large to rapidly diffuse through mucosal barriers. Mucus is continuously secreted, shed, discarded or digested and recycled so most of the trapped particles may be removed from the mucosa tissue within seconds or within a few hours. Large polymeric nanoparticles (200 nm-500 nm in diameter) which have been coated densely with a low molecular weight polyethylene glycol (PEG) diffused through mucus only 4- to 6-fold lower than the same particles diffusing in water (Lai et al. PNAS 2007 104:1482-487; Lai et al. Adv Drug Deliv Rev. 2009 61:158-171; each of which is herein incorporated by reference in its entirety). The transport of nanoparticles may be determined using rates of permeation and/or fluorescent microscopy techniques including, but not limited to, fluorescence recovery after photobleaching (FRAP) and high resolution multiple particle tracking (MPT). As a non-limiting example, compositions which can penetrate a mucosal barrier may be made as described in U.S. Pat. No. 8,241,670 or International Patent Publication No. WO2013110028, the contents of each of which are herein incorporated by reference in its entirety.

[0912] The lipid nanoparticle engineered to penetrate mucus may comprise a polymeric material (i.e. a polymeric core) and/or a polymer-vitamin conjugate and/or a tri-block co-polymer. The polymeric material may include, but is not limited to, polyamines, polyethers, polyamides, polyesters, polycarbamates, polyureas, polycarbonates, poly(styrenes), polyimides, polysulfones, polyurethanes, polyacetylenes, polyethylenes, polyethyeneimines, polyisocyanates, polyacrylates, polymethacrylates, polyacrylonitriles, and polyarylates. The polymeric material may be biodegradable and/or biocompatible. Non-limiting examples of biocompatible polymers are described in International Patent Publication No. WO2013116804, the contents of which are herein incorporated by reference in their entirety. The polymeric material may additionally be irradiated. As a non-limiting example, the polymeric material may be gamma irradiated (see e.g., International App. No. WO201282165, herein incorporated by reference in its entirety). Non-limiting examples of specific polymers include poly(caprolactone) (PCL), ethylene vinyl acetate polymer (EVA), poly(lactic acid) (PLA), poly(L-lactic acid) (PLLA), poly(glycolic acid) (PGA), poly(lactic acid-co-glycolic acid) (PLGA), poly(L-lactic acid-co-glycolic acid) (PLLGA), poly(D,L-lactide) (PDLA), poly(L-lactide) (PLLA), poly(D,L-lactide-co-caprolactone), poly(D,L-lactide-co-caprolactone-co-glycolide), poly(D,L-lactide-co-PEO-co-D,L-lactide), poly(D,L-lactide-co-PPO-co-D,L-lactide), polyalkyl cyanoacralate, polyurethane, poly-L-lysine (PLL), hydroxypropyl methacrylate (HPMA), polyethyleneglycol, poly-L-glutamic acid, poly(hydroxy acids), polyanhydrides, polyorthoesters, poly(ester amides), polyamides, poly(ester ethers), polycarbonates, polyalkylenes such as polyethylene and polypropylene, polyalkylene glycols such as poly(ethylene glycol) (PEG), polyalkylene oxides (PEO), polyalkylene terephthalates such as poly(ethylene terephthalate), polyvinyl alcohols (PVA), polyvinyl ethers, polyvinyl esters such as poly(vinyl acetate), polyvinyl halides such as poly(vinyl chloride) (PVC), polyvinylpyrrolidone, polysiloxanes, polystyrene (PS), polyurethanes, derivatized celluloses such as alkyl celluloses, hydroxyalkyl celluloses, cellulose ethers, cellulose esters, nitro celluloses, hydroxypropylcellulose, carboxymethylcellulose, polymers of acrylic acids, such as poly(methyl(meth)acrylate) (PMMA), poly(ethyl(meth)acrylate), poly(butyl(meth)acrylate), poly(isobutyl(meth)acrylate), poly(hexyl(meth)acrylate), poly(isodecyl(meth)acrylate), poly(lauryl(meth)acrylate), poly(phenyl(meth)acrylate), poly(methyl acrylate), poly(isopropyl acrylate), poly(isobutyl acrylate), poly(octadecyl acrylate) and copolymers and mixtures thereof, polydioxanone and its copolymers, polyhydroxyalkanoates, polypropylene fumarate, polyoxymethylene, poloxamers, poly(ortho)esters, poly(butyric acid), poly(valeric acid), poly(lactide-co-caprolactone), PEG-PLGA-PEG and trimethylene carbonate, polyvinylpyrrolidone. The lipid nanoparticle may be coated or associated with a co-polymer such as, but not limited to, a block co-polymer (such as a branched polyether-polyamide block copolymer described in International Publication No. WO2013012476, herein incorporated by reference in its entirety), and (poly(ethylene glycol))-(poly(propylene oxide))-(poly(ethylene glycol)) triblock copolymer (see e.g., U.S. Publication 20120121718 and U.S. Publication 20100003337 and U.S. Pat. No. 8,263,665, the contents of each of which is herein incorporated by reference in their entirety). The co-polymer may be a polymer that is generally regarded as safe (GRAS) and the formation of the lipid nanoparticle may be in such a way that no new chemical entities are created. For example, the lipid nanoparticle may comprise poloxamers coating PLGA nanoparticles without forming new chemical entities which are still able to rapidly penetrate human mucus (Yang et al. Angew. Chem. Int. Ed. 2011 50:2597-2600; the contents of which are herein incorporated by reference in their entirety). A non-limiting scalable method to produce nanoparticles which can penetrate human mucus is described by Xu et al. (see, e.g., J Control Release 2013, 170:279-86; the contents of which are herein incorporated by reference in their entirety).

[0913] The vitamin of the polymer-vitamin conjugate may be vitamin E. The vitamin portion of the conjugate may be substituted with other suitable components such as, but not limited to, vitamin A, vitamin E, other vitamins, cholesterol, a hydrophobic moiety, or a hydrophobic component of other surfactants (e.g., sterol chains, fatty acids, hydrocarbon chains and alkylene oxide chains).

[0914] The lipid nanoparticle engineered to penetrate mucus may include surface altering agents such as, but not limited to, polynucleotides, anionic proteins (e.g., bovine serum albumin), surfactants (e.g., cationic surfactants such as for example dimethyldioctadecyl-ammonium bromide), sugars or sugar derivatives (e.g., cyclodextrin), nucleic acids, polymers (e.g., heparin, polyethylene glycol and poloxamer), mucolytic agents (e.g., N-acetylcysteine, mugwort, bromelain, papain, clerodendrum, acetylcysteine, bromhexine, carbocisteine, eprazinone, mesna, ambroxol, sobrerol, domiodol, letosteine, stepronin, tiopronin, gelsolin, thymosin β4 dornase alfa, neltenexine, erdosteine) and various DNases including rhDNase. The surface altering agent may be embedded or enmeshed in the particle's surface or disposed (e.g., by coating, adsorption, covalent linkage, or other process) on the surface of the lipid nanoparticle. (see e.g., U.S. Publication 20100215580 and U.S. Publication 20080166414 and US20130164343; the contents of each of which are herein incorporated by reference in their entirety).

[0915] In some embodiments, the mucus penetrating lipid nanoparticles may comprise at least one polynucleotide described herein. The polynucleotide may be encapsulated in the lipid nanoparticle and/or disposed on the surface of the particle. The polynucleotide may be covalently coupled to the lipid nanoparticle. Formulations of mucus penetrating lipid nanoparticles may comprise a plurality of nanoparticles. Further, the formulations may contain particles which may interact with the mucus and alter the structural and/or adhesive properties of the surrounding mucus to decrease mucoadhesion, which may increase the delivery of the mucus penetrating lipid nanoparticles to the mucosal tissue.

[0916] In some embodiments, the mucus penetrating lipid nanoparticles may be a hypotonic formulation comprising a mucosal penetration enhancing coating. The formulation may be hypotonic for the epithelium to which it is being delivered. Non-limiting examples of hypotonic formulations may be found in International Patent Publication No. WO2013110028, the contents of which are herein incorporated by reference in their entirety.

[0917] In some embodiments, in order to enhance the delivery through the mucosal barrier the RNA (e.g., mRNA) vaccine formulation may comprise or be a hypotonic solution. Hypotonic solutions were found to increase the rate at which mucoinert particles such as, but not limited to, mucus-penetrating particles, were able to reach the vaginal epithelial surface (see e.g., Ensign et al. Biomaterials 2013 34 (28): 6922-9, the contents of which are herein incorporated by reference in their entirety).

[0918] In some embodiments, the RNA (e.g., mRNA) vaccine is formulated as a lipoplex, such as, without limitation, the ATUPLEX™® system, the DACC system, the DBTC system and other siRNA-lipoplex technology from Silence Therapeutics (London, United Kingdom), STEMFECT™ from STEMGENT® (Cambridge, MA), and polyethylenimine (PEI) or protamine-based targeted and non-targeted delivery of nucleic acids (Aleku et al. Cancer Res. 2008 68:9788-9798; Strumberg et al. Int J Clin Pharmacol Ther 2012 50:76-78; Santel et al., Gene Ther 2006 13:1222-1234; Santel et al., Gene Ther 2006 13:1360-1370; Gutbier et al., Pulm Pharmacol. Ther. 2010 23:334-344; Kaufmann et al. Microvasc Res 2010 80:286-293Weide et al. J Immunother. 2009 32:498-507; Weide et al. J Immunother. 2008 31:180-188; Pascolo Expert Opin. Biol. Ther. 4:1285-1294; Fotin-Mleczek et al., 2011 J. Immunother. 34:1-15; Song et al., Nature Biotechnol. 2005, 23:709-717; Peer et al., Proc Natl Acad Sci USA. 2007 6; 104:4095-4100; deFougerolles Hum Gene Ther. 2008 19:125-132, the contents of each of which are incorporated herein by reference in their entirety).

[0919] In some embodiments, such formulations may also be constructed or compositions altered such that they passively or actively are directed to different cell types in vivo, including but not limited to hepatocytes, immune cells, tumor cells, endothelial cells, antigen presenting cells, and leukocytes (Akinc et al. Mol Ther. 2010 18:1357-1364; Song et al., Nat Biotechnol. 2005 23:709-717; Judge et al., J Clin Invest. 2009 119:661-673; Kaufmann et al., Microvasc Res 2010 80:286-293; Santel et al., Gene Ther 2006 13:1222-1234; Santel et al., Gene Ther 2006 13:1360-1370; Gutbier et al., Pulm Pharmacol. Ther. 2010 23:334-344; Basha et al., Mol. Ther. 2011 19:2186-2200; Fenske and Cullis, Expert Opin Drug Deliv. 2008 5:25-44; Peer et al., Science. 2008 319:627-630; Peer and Lieberman, Gene Ther. 2011 18:1127-1133, the contents of each of which are incorporated herein by reference in their entirety). One example of passive targeting of formulations to liver cells includes the DLin-DMA, DLin-KC2-DMA and DLin-MC3-DMA-based lipid nanoparticle formulations, which have been shown to bind to apolipoprotein E and promote binding and uptake of these formulations into hepatocytes in vivo (Akinc et al. Mol Ther. 2010 18:1357-1364, the contents of which are incorporated herein by reference in their entirety). Formulations can also be selectively targeted through expression of different ligands on their surface as exemplified by, but not limited by, folate, transferrin, N-acetylgalactosamine (GalNAc), and antibody targeted approaches (Kolhatkar et al., Curr Drug Discov Technol. 2011 8:197-206; Musacchio and Torchilin, Front Biosci. 2011 16:1388-1412; Yu et al., Mol Membr Biol. 2010 27:286-298; Patil et al., Crit Rev Ther Drug Carrier Syst. 2008 25:1-61; Benoit et al., Biomacromolecules. 2011 12:2708-2714; Zhao et al., Expert Opin Drug Deliv. 2008 5:309-319; Akinc et al., Mol Ther. 2010 18:1357-1364; Srinivasan et al., Methods Mol Biol. 2012 820:105-116; Ben-Aric et al., Methods Mol Biol. 2012 757:497-507; Peer 2010 J Control Release. 20:63-68; Peer et al., Proc Natl Acad Sci USA. 2007 104:4095-4100; Kim et al., Methods Mol Biol. 2011 721:339-353; Subramanya et al., Mol Ther. 2010 18:2028-2037; Song et al., Nat Biotechnol. 2005 23:709-717; Peer et al., Science. 2008 319:627-630; Peer and Lieberman, Gene Ther. 2011 18:1127-1133, the contents of each of which are incorporated herein by reference in their entirety).

[0920] In some embodiments, the RNA (e.g., mRNA) vaccine is formulated as a solid lipid nanoparticle. A solid lipid nanoparticle (SLN) may be spherical with an average diameter between 10 to 1000 nm. SLNs possess a solid lipid core matrix that can solubilize lipophilic molecules and may be stabilized with surfactants and/or emulsifiers. In some embodiments, the lipid nanoparticle may be a self-assembly lipid-polymer nanoparticle (see Zhang et al., ACS Nano, 2008, 2, pp 1696-1702; the contents of which are herein incorporated by reference in their entirety). As a non-limiting example, the SLN may be the SLN described in International Patent Publication No. WO2013105101, the contents of which are herein incorporated by reference in their entirety. As another non-limiting example, the SLN may be made by the methods or processes described in International Patent Publication No. WO2013105101, the contents of which are herein incorporated by reference in their entirety.

[0921] Liposomes, lipoplexes, or lipid nanoparticles may be used to improve the efficacy of polynucleotides directed protein production as these formulations may be able to increase cell transfection by the RNA (e.g., mRNA) vaccine; and/or increase the translation of encoded protein. One such example involves the use of lipid encapsulation to enable the effective systemic delivery of polyplex plasmid DNA (Heyes et al., Mol Ther. 2007 15:713-720; the contents of which are incorporated herein by reference in their entirety). The liposomes, lipoplexes, or lipid nanoparticles may also be used to increase the stability of the polynucleotide.

[0922] In some embodiments, the RNA (e.g., mRNA) vaccines of the present disclosure can be formulated for controlled release and/or targeted delivery. As used herein, “controlled release” refers to a pharmaceutical composition or compound release profile that conforms to a particular pattern of release to effect a therapeutic outcome. In some embodiments, the RNA (e.g., mRNA) vaccines may be encapsulated into a delivery agent described herein and/or known in the art for controlled release and/or targeted delivery. As used herein, the term “encapsulate” means to enclose, surround or encase. As it relates to the formulation of the compounds of the disclosure, encapsulation may be substantial, complete or partial. The term “substantially encapsulated” means that at least greater than 50, 60, 70, 80, 85, 90, 95, 96, 97, 98, 99, 99.9, 99.99 or greater than 99.999% of the pharmaceutical composition or compound of the disclosure may be enclosed, surrounded or encased within the delivery agent. “Partially encapsulation” means that less than 10, 10, 20, 30, 40, 50% or less of the pharmaceutical composition or compound of the disclosure may be enclosed, surrounded or encased within the delivery agent. Advantageously, encapsulation may be determined by measuring the escape or the activity of the pharmaceutical composition or compound of the disclosure using fluorescence and/or electron micrograph. For example, at least 1, 5, 10, 20, 30, 40, 50, 60, 70, 80, 85, 90, 95, 96, 97, 98, 99, 99.9, 99.99 or greater than 99.999% of the pharmaceutical composition or compound of the disclosure are encapsulated in the delivery agent.

[0923] In some embodiments, the controlled release formulation may include, but is not limited to, tri-block co-polymers. As a non-limiting example, the formulation may include two different types of tri-block co-polymers (International Pub. No. WO2012131104 and WO2012131106, the contents of each of which are incorporated herein by reference in their entirety).

[0924] In some embodiments, the RNA (e.g., mRNA) vaccines may be encapsulated into a lipid nanoparticle or a rapidly eliminated lipid nanoparticle and the lipid nanoparticles or a rapidly eliminated lipid nanoparticle may then be encapsulated into a polymer, hydrogel and/or surgical sealant described herein and/or known in the art. As a non-limiting example, the polymer, hydrogel or surgical sealant may be PLGA, ethylene vinyl acetate (EVAc), poloxamer, GELSITE® (Nanotherapeutics, Inc. Alachua, FL), HYLENEX® (Halozyme Therapeutics, San Diego CA), surgical sealants such as fibrinogen polymers (Ethicon Inc. Cornelia, GA), TISSELL® (Baxter International, Inc Deerfield, IL), PEG-based sealants, and COSEAL® (Baxter International, Inc Deerfield, IL).

[0925] In some embodiments, the lipid nanoparticle may be encapsulated into any polymer known in the art which may form a gel when injected into a subject. As another non-limiting example, the lipid nanoparticle may be encapsulated into a polymer matrix which may be biodegradable.

[0926] In some embodiments, the RNA (e.g., mRNA) vaccine formulation for controlled release and/or targeted delivery may also include at least one controlled release coating. Controlled release coatings include, but are not limited to, OPADRY®, polyvinylpyrrolidone/vinyl acetate copolymer, polyvinylpyrrolidone, hydroxypropyl methylcellulose, hydroxypropyl cellulose, hydroxyethyl cellulose, EUDRAGIT RL®, EUDRAGIT RS® and cellulose derivatives such as ethylcellulose aqueous dispersions (AQUACOAT® and SURELEASE®).

[0927] In some embodiments, the RNA (e.g., mRNA) vaccine controlled release and/or targeted delivery formulation may comprise at least one degradable polyester which may contain polycationic side chains. Degradeable polyesters include, but are not limited to, poly(serine ester), poly(L-lactide-co-L-lysine), poly(4-hydroxy-L-proline ester), and combinations thereof. In some embodiments, the degradable polyesters may include a PEG conjugation to form a PEGylated polymer.

[0928] In some embodiments, the RNA (e.g., mRNA) vaccine controlled release and/or targeted delivery formulation comprising at least one polynucleotide may comprise at least one PEG and/or PEG related polymer derivatives as described in U.S. Pat. No. 8,404,222, the contents of which are incorporated herein by reference in their entirety.

[0929] In some embodiments, the RNA (e.g., mRNA) vaccine controlled release delivery formulation comprising at least one polynucleotide may be the controlled release polymer system described in US20130130348, the contents of which are incorporated herein by reference in their entirety.

[0930] In some embodiments, the RNA (e.g., mRNA) vaccines of the present disclosure may be encapsulated in a therapeutic nanoparticle, referred to herein as “therapeutic nanoparticle RNA (e.g., mRNA) vaccines.” Therapeutic nanoparticles may be formulated by methods described herein and known in the art such as, but not limited to, International Pub Nos. WO2010005740, WO2010030763, WO2010005721, WO2010005723, WO2012054923, U.S. Publication Nos. US20110262491, US20100104645, US20100087337, US20100068285, US20110274759, US20100068286, US20120288541, US20130123351 and US20130230567 and U.S. Pat. Nos. 8,206,747, 8,293,276, 8,318,208 and 8,318,211; the contents of each of which are herein incorporated by reference in their entirety. In some embodiments, therapeutic polymer nanoparticles may be identified by the methods described in US Pub No. US20120140790, the contents of which are herein incorporated by reference in their entirety.

[0931] In some embodiments, the therapeutic nanoparticle RNA (e.g., mRNA) vaccine may be formulated for sustained release. As used herein, “sustained release” refers to a pharmaceutical composition or compound that conforms to a release rate over a specific period of time. The period of time may include, but is not limited to, hours, days, weeks, months and years. As a non-limiting example, the sustained release nanoparticle may comprise a polymer and a therapeutic agent such as, but not limited to, the polynucleotides of the present disclosure (see International Pub No. 2010075072 and US Pub No. US20100216804, US20110217377 and US20120201859, the contents of each of which are incorporated herein by reference in their entirety). In another non-limiting example, the sustained release formulation may comprise agents which permit persistent bioavailability such as, but not limited to, crystals, macromolecular gels and/or particulate suspensions (see U.S. Patent Publication No. US20130150295, the contents of each of which are incorporated herein by reference in their entirety).

[0932] In some embodiments, the therapeutic nanoparticle RNA (e.g., mRNA) vaccines may be formulated to be target specific. As a non-limiting example, the therapeutic nanoparticles may include a corticosteroid (see International Pub. No. WO2011084518, the contents of which are incorporated herein by reference in their entirety). As a non-limiting example, the therapeutic nanoparticles may be formulated in nanoparticles described in International Pub No. WO2008121949, WO2010005726, WO2010005725, WO2011084521 and US Pub No. US20100069426, US20120004293 and US20100104655, the contents of each of which are incorporated herein by reference in their entirety.

[0933] In some embodiments, the nanoparticles of the present disclosure may comprise a polymeric matrix. As a non-limiting example, the nanoparticle may comprise two or more polymers such as, but not limited to, polyethylenes, polycarbonates, polyanhydrides, polyhydroxyacids, polypropylfumerates, polycaprolactones, polyamides, polyacetals, polyethers, polyesters, poly(orthoesters), polycyanoacrylates, polyvinyl alcohols, polyurethanes, polyphosphazenes, polyacrylates, polymethacrylates, polycyanoacrylates, polyureas, polystyrenes, polyamines, polylysine, poly(ethylene imine), poly(serine ester), poly(L-lactide-co-L-lysine), poly(4-hydroxy-L-proline ester) or combinations thereof.

[0934] In some embodiments, the therapeutic nanoparticle comprises a diblock copolymer. In some embodiments, the diblock copolymer may include PEG in combination with a polymer such as, but not limited to, polyethylenes, polycarbonates, polyanhydrides, polyhydroxyacids, polypropylfumerates, polycaprolactones, polyamides, polyacetals, polyethers, polyesters, poly(orthoesters), polycyanoacrylates, polyvinyl alcohols, polyurethanes, polyphosphazenes, polyacrylates, polymethacrylates, polycyanoacrylates, polyureas, polystyrenes, polyamines, polylysine, poly(ethylene imine), poly(serine ester), poly(L-lactide-co-L-lysine), poly(4-hydroxy-L-proline ester) or combinations thereof. In yet another embodiment, the diblock copolymer may be a high-X diblock copolymer such as those described in International Patent Publication No. WO2013120052, the contents of which are incorporated herein by reference in their entirety.

[0935] As a non-limiting example the therapeutic nanoparticle comprises a PLGA-PEG block copolymer (see U.S. Publication No. US20120004293 and U.S. Pat. No. 8,236,330, each of which is herein incorporated by reference in their entirety). In another non-limiting example, the therapeutic nanoparticle is a stealth nanoparticle comprising a diblock copolymer of PEG and PLA or PEG and PLGA (see U.S. Pat. No. 8,246,968 and International Publication No. WO2012166923, the contents of each of which are herein incorporated by reference in their entirety). In yet another non-limiting example, the therapeutic nanoparticle is a stealth nanoparticle or a target-specific stealth nanoparticle as described in U.S. Patent Publication No. US20130172406, the contents of which are herein incorporated by reference in their entirety.

[0936] In some embodiments, the therapeutic nanoparticle may comprise a multiblock copolymer (see e.g., U.S. Pat. Nos. 8,263,665 and 8,287,910 and U.S. Patent Pub. No. US20130195987, the contents of each of which are herein incorporated by reference in their entirety).

[0937] In yet another non-limiting example, the lipid nanoparticle comprises the block copolymer PEG-PLGA-PEG (see e.g., the thermosensitive hydrogel (PEG-PLGA-PEG) was used as a TGF-beta1 gene delivery vehicle in Lee et al. Thermosensitive Hydrogel as a TGF-β1 Gene Delivery Vehicle Enhances Diabetic Wound Healing. Pharmaceutical Research, 2003 20 (12): 1995-2000; as a controlled gene delivery system in Li et al. Controlled Gene Delivery System Based on Thermosensitive Biodegradable Hydrogel. Pharmaceutical Research 2003 20:884-888; and Chang et al., Non-ionic amphiphilic biodegradable PEG-PLGA-PEG copolymer enhances gene delivery efficiency in rat skeletal muscle. J Controlled Release. 2007 118:245-253, the contents of each of which are herein incorporated by reference in their entirety). The RNA (e.g., mRNA) vaccines of the present disclosure may be formulated in lipid nanoparticles comprising the PEG-PLGA-PEG block copolymer.

[0938] In some embodiments, the therapeutic nanoparticle may comprise a multiblock copolymer (see e.g., U.S. Pat. Nos. 8,263,665 and 8,287,910 and U.S. Patent Pub. No. US20130195987, the contents of each of which are herein incorporated by reference in their entirety).

[0939] In some embodiments, the block copolymers described herein may be included in a polyion complex comprising a non-polymeric micelle and the block copolymer. (see e.g., U.S. Publication No. 20120076836, the contents of which are herein incorporated by reference in their entirety).

[0940] In some embodiments, the therapeutic nanoparticle may comprise at least one acrylic polymer. Acrylic polymers include but are not limited to, acrylic acid, methacrylic acid, acrylic acid and methacrylic acid copolymers, methyl methacrylate copolymers, ethoxyethyl methacrylates, cyanoethyl methacrylate, amino alkyl methacrylate copolymer, poly(acrylic acid), poly(methacrylic acid), polycyanoacrylates and combinations thereof.

[0941] In some embodiments, the therapeutic nanoparticles may comprise at least one poly(vinyl ester) polymer. The poly(vinyl ester) polymer may be a copolymer such as a random copolymer. As a non-limiting example, the random copolymer may have a structure such as those described in International Application No. WO2013032829 or U.S. Patent Publication No US20130121954, the contents of each of which are herein incorporated by reference in their entirety. In some embodiments, the poly(vinyl ester) polymers may be conjugated to the polynucleotides described herein.

[0942] In some embodiments, the therapeutic nanoparticle may comprise at least one diblock copolymer. The diblock copolymer may be, but it not limited to, a poly(lactic) acid-poly(ethylene) glycol copolymer (see, e.g., International Patent Publication No. WO2013044219, the contents of which are herein incorporated by reference in their entirety). As a non-limiting example, the therapeutic nanoparticle may be used to treat cancer (see International publication No. WO2013044219, the contents of which are herein incorporated by reference in their entirety).

[0943] In some embodiments, the therapeutic nanoparticles may comprise at least one cationic polymer described herein and/or known in the art.

[0944] In some embodiments, the therapeutic nanoparticles may comprise at least one amine-containing polymer such as, but not limited to polylysine, polyethylene imine, poly(amidoamine) dendrimers, poly(beta-amino esters) (see, e.g., U.S. Pat. No. 8,287,849, the contents of which are herein incorporated by reference in their entirety) and combinations thereof.

[0945] In some embodiments, the nanoparticles described herein may comprise an amine cationic lipid such as those described in International Patent Application No. WO2013059496, the contents of which are herein incorporated by reference in their entirety. In some embodiments, the cationic lipids may have an amino-amine or an amino-amide moiety.

[0946] In some embodiments, the therapeutic nanoparticles may comprise at least one degradable polyester which may contain polycationic side chains. Degradeable polyesters include, but are not limited to, poly(serine ester), poly(L-lactide-co-L-lysine), poly(4-hydroxy-L-proline ester), and combinations thereof. In some embodiments, the degradable polyesters may include a PEG conjugation to form a PEGylated polymer.

[0947] In some embodiments, the synthetic nanocarriers may contain an immunostimulatory agent to enhance the immune response from delivery of the synthetic nanocarrier. As a non-limiting example, the synthetic nanocarrier may comprise a Th1 immunostimulatory agent, which may enhance a Th 1-based response of the immune system (see International Pub No. WO2010123569 and U.S. Publication No. US20110223201, the contents of each of which are herein incorporated by reference in their entirety).

[0948] In some embodiments, the synthetic nanocarriers may be formulated for targeted release. In some embodiments, the synthetic nanocarrier is formulated to release the polynucleotides at a specified pH and/or after a desired time interval. As a non-limiting example, the synthetic nanoparticle may be formulated to release the RNA (e.g., mRNA) vaccines after 24 hours and/or at a pH of 4.5 (see International Publication Nos. WO2010138193 and WO2010138194 and US Pub Nos. US20110020388 and US20110027217, each of which is herein incorporated by reference in their entireties).

[0949] In some embodiments, the synthetic nanocarriers may be formulated for controlled and/or sustained release of the polynucleotides described herein. As a non-limiting example, the synthetic nanocarriers for sustained release may be formulated by methods known in the art, described herein and/or as described in International Pub No. WO2010138192 and US Pub No. 20100303850, each of which is herein incorporated by reference in their entirety.

[0950] In some embodiments, the RNA (e.g., mRNA) vaccine may be formulated for controlled and/or sustained release wherein the formulation comprises at least one polymer that is a crystalline side chain (CYSC) polymer. CYSC polymers are described in U.S. Pat. No. 8,399,007, herein incorporated by reference in its entirety.

[0951] In some embodiments, the synthetic nanocarrier may be formulated for use as a vaccine. In some embodiments, the synthetic nanocarrier may encapsulate at least one polynucleotide which encode at least one antigen. As a non-limiting example, the synthetic nanocarrier may include at least one antigen and an excipient for a vaccine dosage form (see International Publication No. WO2011150264 and U.S. Publication No. US20110293723, the contents of each of which are herein incorporated by reference in their entirety). As another non-limiting example, a vaccine dosage form may include at least two synthetic nanocarriers with the same or different antigens and an excipient (see International Publication No. WO2011150249 and U.S. Publication No. US20110293701, the contents of each of which are herein incorporated by reference in their entirety). The vaccine dosage form may be selected by methods described herein, known in the art and/or described in International Publication No. WO2011150258 and U.S. Publication No. US20120027806, the contents of each of which are herein incorporated by reference in their entirety).

[0952] In some embodiments, the synthetic nanocarrier may comprise at least one polynucleotide which encodes at least one adjuvant. As non-limiting example, the adjuvant may comprise dimethyldioctadecylammonium-bromide, dimethyldioctadecylammonium-chloride, dimethyldioctadecylammonium-phosphate or dimethyldioctadecylammonium-acetate (DDA) and an apolar fraction or part of said apolar fraction of a total lipid extract of a mycobacterium (see, e.g., U.S. Pat. No. 8,241,610, the content of which is herein incorporated by reference in its entirety). In some embodiments, the synthetic nanocarrier may comprise at least one polynucleotide and an adjuvant. As a non-limiting example, the synthetic nanocarrier comprising and adjuvant may be formulated by the methods described in International Publication No. WO2011150240 and U.S. Publication No. US20110293700, the contents of each of which are herein incorporated by reference in their entirety.

[0953] In some embodiments, the synthetic nanocarrier may encapsulate at least one polynucleotide that encodes a peptide, fragment or region from a virus. As a non-limiting example, the synthetic nanocarrier may include, but is not limited to, any of the nanocarriers described in International Publication No. WO2012024621, WO201202629, WO2012024632 and U.S. Publication No. US20120064110, US20120058153 and US20120058154, the contents of each of which are herein incorporated by reference in their entirety.

[0954] In some embodiments, the synthetic nanocarrier may be coupled to a polynucleotide which may be able to trigger a humoral and/or cytotoxic T lymphocyte (CTL) response (see, e.g., International Publication No. WO2013019669, the contents of which are herein incorporated by reference in their entirety).

[0955] In some embodiments, the RNA (e.g., mRNA) vaccine may be encapsulated in, linked to and/or associated with zwitterionic lipids. Non-limiting examples of zwitterionic lipids and methods of using zwitterionic lipids are described in U.S. Patent Publication No. US20130216607, the contents of which are herein incorporated by reference in their entirety. In some aspects, the zwitterionic lipids may be used in the liposomes and lipid nanoparticles described herein.

[0956] In some embodiments, the RNA (e.g., mRNA) vaccine may be formulated in colloid nanocarriers as described in U.S. Patent Publication No. US20130197100, the contents of which are herein incorporated by reference in their entirety.

[0957] In some embodiments, the nanoparticle may be optimized for oral administration. The nanoparticle may comprise at least one cationic biopolymer such as, but not limited to, chitosan or a derivative thereof. As a non-limiting example, the nanoparticle may be formulated by the methods described in U.S. Publication No. 20120282343, the contents of which are herein incorporated by reference in their entirety.

[0958] In some embodiments, LNPs comprise the lipid KL52 (an amino-lipid disclosed in U.S. Application Publication No. 2012/0295832, the contents of which are herein incorporated by reference in their entirety. Activity and/or safety (as measured by examining one or more of ALT/AST, white blood cell count and cytokine induction, for example) of LNP administration may be improved by incorporation of such lipids. LNPs comprising KL52 may be administered intravenously and/or in one or more doses. In some embodiments, administration of LNPs comprising KL52 results in equal or improved mRNA and/or protein expression as compared to LNPs comprising MC3.

[0959] In some embodiments, RNA (e.g., mRNA) vaccine may be delivered using smaller LNPs. Such particles may comprise a diameter from below 0.1 um up to 100 nm such as, but not limited to, less than 0.1 um, less than 1.0 um, less than 5 um, less than 10 um, less than 15 um, less than 20 um, less than 25 um, less than 30 um, less than 35 um, less than 40 um, less than 50 um, less than 55 um, less than 60 um, less than 65 um, less than 70 um, less than 75 um, less than 80 um, less than 85 um, less than 90 um, less than 95 um, less than 100 um, less than 125 um, less than 150 um, less than 175 um, less than 200 um, less than 225 um, less than 250 um, less than 275 um, less than 300 um, less than 325 um, less than 350 um, less than 375 um, less than 400 um, less than 425 um, less than 450 um, less than 475 um, less than 500 um, less than 525 um, less than 550 um, less than 575 um, less than 600 um, less than 625 um, less than 650 um, less than 675 um, less than 700 um, less than 725 um, less than 750 um, less than 775 um, less than 800 um, less than 825 um, less than 850 um, less than 875 um, less than 900 um, less than 925 um, less than 950 um, less than 975 um, or less than 1000 um.

[0960] In some embodiments, RNA (e.g., mRNA) vaccines may be delivered using smaller LNPs, which may comprise a diameter from about 1 nm to about 100 nm, from about 1 nm to about 10 nm, about 1 nm to about 20 nm, from about 1 nm to about 30 nm, from about 1 nm to about 40 nm, from about 1 nm to about 50 nm, from about 1 nm to about 60 nm, from about 1 nm to about 70 nm, from about 1 nm to about 80 nm, from about 1 nm to about 90 nm, from about 5 nm to about from 100 nm, from about 5 nm to about 10 nm, about 5 nm to about 20 nm, from about 5 nm to about 30 nm, from about 5 nm to about 40 nm, from about 5 nm to about 50 nm, from about 5 nm to about 60 nm, from about 5 nm to about 70 nm, from about 5 nm to about 80 nm, from about 5 nm to about 90 nm, about 10 to about 50 nm, from about 20 to about 50 nm, from about 30 to about 50 nm, from about 40 to about 50 nm, from about 20 to about 60 nm, from about 30 to about 60 nm, from about 40 to about 60 nm, from about 20 to about 70 nm, from about 30 to about 70 nm, from about 40 to about 70 nm, from about 50 to about 70 nm, from about 60 to about 70 nm, from about 20 to about 80 nm, from about 30 to about 80 nm, from about 40 to about 80 nm, from about 50 to about 80 nm, from about 60 to about 80 nm, from about 20 to about 90 nm, from about 30 to about 90 nm, from about 40 to about 90 nm, from about 50 to about 90 nm, from about 60 to about 90 nm and/or from about 70 to about 90 nm.

[0961] In some embodiments, such LNPs are synthesized using methods comprising microfluidic mixers. Examples of microfluidic mixers may include, but are not limited to, a slit interdigital micromixer including, but not limited to those manufactured by Microinnova (Allerheiligen bei Wildon, Austria) and/or a staggered herringbone micromixer (SHM) (Zhigaltsev, I. V. et al., Bottom-up design and synthesis of limit size lipid nanoparticle systems with aqueous and triglyceride cores using millisecond microfluidic mixing have been published (Langmuir. 2012. 28:3633-40; Belliveau, N. M. et al., Microfluidic synthesis of highly potent limit-size lipid nanoparticles for in vivo delivery of siRNA. Molecular Therapy-Nucleic Acids. 2012. 1:037; Chen, D. et al., Rapid discovery of potent siRNA-containing lipid nanoparticles enabled by controlled microfluidic formulation. J Am Chem Soc. 2012. 134 (16): 6948-51, the contents of each of which are herein incorporated by reference in their entirety). In some embodiments, methods of LNP generation comprising SHM, further comprise the mixing of at least two input streams wherein mixing occurs by microstructure-induced chaotic advection (MICA). According to this method, fluid streams flow through channels present in a herringbone pattern, causing rotational flow and folding the fluids around each other. This method may also comprise a surface for fluid mixing wherein the surface changes orientations during fluid cycling. Methods of generating LNPs using SHM include those disclosed in U.S. Application Publication Nos. 2004/0262223 and 2012/0276209, the contents of each of which are herein incorporated by reference in their entirety.

[0962] In some embodiments, the RNA (e.g., mRNA) vaccine of the present disclosure may be formulated in lipid nanoparticles created using a micromixer such as, but not limited to, a Slit Interdigital Microstructured Mixer (SIMM-V2) or a Standard Slit Interdigital Micro Mixer (SSIMM) or Caterpillar (CPMM) or Impinging-jet (IJMM) from the Institut für Mikrotechnik Mainz GmbH, Mainz Germany.

[0963] In some embodiments, the RNA (e.g., mRNA) vaccines of the present disclosure may be formulated in lipid nanoparticles created using microfluidic technology (see, e.g., Whitesides, George M. The Origins and the Future of Microfluidics. Nature, 2006 442:368-373; and Abraham et al. Chaotic Mixer for Microchannels. Science, 2002 295:647-651; each of which is herein incorporated by reference in its entirety). As a non-limiting example, controlled microfluidic formulation includes a passive method for mixing streams of steady pressure-driven flows in micro channels at a low Reynolds number (see, e.g., Abraham et al. Chaotic Mixer for Microchannels. Science, 2002 295:647-651, the contents of which are herein incorporated by reference in their entirety).

[0964] In some embodiments, the RNA (e.g., mRNA) vaccines of the present disclosure may be formulated in lipid nanoparticles created using a micromixer chip such as, but not limited to, those from Harvard Apparatus (Holliston, MA) or Dolomite Microfluidics (Royston, UK). A micromixer chip can be used for rapid mixing of two or more fluid streams with a split and recombine mechanism.

[0965] In some embodiments, the RNA (e.g., mRNA) vaccines of the disclosure may be formulated for delivery using the drug encapsulating microspheres described in International Patent Publication No. WO2013063468 or U.S. Pat. No. 8,440,614, the contents of each of which are herein incorporated by reference in their entirety. The microspheres may comprise a compound of the formula (I), (II), (III), (IV), (V) or (VI) as described in International Patent Publication No. WO2013063468, the contents of which are herein incorporated by reference in their entirety. In some embodiments, the amino acid, peptide, polypeptide, and/or lipids are useful in delivering the RNA (e.g., mRNA) vaccines of the disclosure to cells (see International Patent Publication No. WO2013063468, the contents of which are herein incorporated by reference in their entirety).

[0966] In some embodiments, the RNA (e.g., mRNA) vaccines of the disclosure may be formulated in lipid nanoparticles having a diameter from about 10 to about 100 nm such as, but not limited to, about 10 to about 20 nm, about 10 to about 30 nm, about 10 to about 40 nm, about 10 to about 50 nm, about 10 to about 60 nm, about 10 to about 70 nm, about 10 to about 80 nm, about 10 to about 90 nm, about 20 to about 30 nm, about 20 to about 40 nm, about 20 to about 50 nm, about 20 to about 60 nm, about 20 to about 70 nm, about 20 to about 80 nm, about 20 to about 90 nm, about 20 to about 100 nm, about 30 to about 40 nm, about 30 to about 50 nm, about 30 to about 60 nm, about 30 to about 70 nm, about 30 to about 80 nm, about 30 to about 90 nm, about 30 to about 100 nm, about 40 to about 50 nm, about 40 to about 60 nm, about 40 to about 70 nm, about 40 to about 80 nm, about 40 to about 90 nm, about 40 to about 100 nm, about 50 to about 60 nm, about 50 to about 70 nm about 50 to about 80 nm, about 50 to about 90 nm, about 50 to about 100 nm, about 60 to about 70 nm, about 60 to about 80 nm, about 60 to about 90 nm, about 60 to about 100 nm, about 70 to about 80 nm, about 70 to about 90 nm, about 70 to about 100 nm, about 80 to about 90 nm, about 80 to about 100 nm and/or about 90 to about 100 nm.

[0967] In some embodiments, the lipid nanoparticles may have a diameter from about 10 to 500 nm.

[0968] In some embodiments, the lipid nanoparticle may have a diameter greater than 100 nm, greater than 150 nm, greater than 200 nm, greater than 250 nm, greater than 300 nm, greater than 350 nm, greater than 400 nm, greater than 450 nm, greater than 500 nm, greater than 550 nm, greater than 600 nm, greater than 650 nm, greater than 700 nm, greater than 750 nm, greater than 800 nm, greater than 850 nm, greater than 900 nm, greater than 950 nm or greater than 1000 nm.

[0969] In some embodiments, the lipid nanoparticle may be a limit size lipid nanoparticle described in International Patent Publication No. WO2013059922, the contents of which are herein incorporated by reference in their entirety. The limit size lipid nanoparticle may comprise a lipid bilayer surrounding an aqueous core or a hydrophobic core; where the lipid bilayer may comprise a phospholipid such as, but not limited to, diacylphosphatidylcholine, a diacylphosphatidylethanolamine, a ceramide, a sphingomyelin, a dihydrosphingomyelin, a cephalin, a cerebroside, a C8-C20 fatty acid diacylphophatidylcholine, and 1-palmitoyl-2-oleoyl phosphatidylcholine (POPC). In some embodiments, the limit size lipid nanoparticle may comprise a polyethylene glycol-lipid such as, but not limited to, DLPE-PEG, DMPE-PEG, DPPC-PEG and DSPE-PEG.

[0970] In some embodiments, the RNA (e.g., mRNA) vaccines may be delivered, localized and/or concentrated in a specific location using the delivery methods described in International Patent Publication No. WO2013063530, the contents of which are herein incorporated by reference in their entirety. As a non-limiting example, a subject may be administered an empty polymeric particle prior to, simultaneously with or after delivering the RNA (e.g., mRNA) vaccines to the subject. The empty polymeric particle undergoes a change in volume once in contact with the subject and becomes lodged, embedded, immobilized or entrapped at a specific location in the subject.

[0971] In some embodiments, the RNA (e.g., mRNA) vaccines may be formulated in an active substance release system (see, e.g., U.S. Patent Publication No. US20130102545, the contents of which are herein incorporated by reference in their entirety). The active substance release system may comprise 1) at least one nanoparticle bonded to an oligonucleotide inhibitor strand which is hybridized with a catalytically active nucleic acid and 2) a compound bonded to at least one substrate molecule bonded to a therapeutically active substance (e.g., polynucleotides described herein), where the therapeutically active substance is released by the cleavage of the substrate molecule by the catalytically active nucleic acid.

[0972] In some embodiments, the RNA (e.g., mRNA) vaccines may be formulated in a nanoparticle comprising an inner core comprising a non-cellular material and an outer surface comprising a cellular membrane. The cellular membrane may be derived from a cell or a membrane derived from a virus. As a non-limiting example, the nanoparticle may be made by the methods described in International Patent Publication No. WO2013052167, the contents of which are herein incorporated by reference in their entirety. As another non-limiting example, the nanoparticle described in International Patent Publication No. WO2013052167, the contents of which are herein incorporated by reference in their entirety, may be used to deliver the RNA (e.g., mRNA) vaccines described herein.

[0973] In some embodiments, the RNA (e.g., mRNA) vaccines may be formulated in porous nanoparticle-supported lipid bilayers (protocells). Protocells are described in International Patent Publication No. WO2013056132, the contents of which are herein incorporated by reference in their entirety.

[0974] In some embodiments, the RNA (e.g., mRNA) vaccines described herein may be formulated in polymeric nanoparticles as described in or made by the methods described in U.S. Pat. Nos. 8,420,123 and 8,518,963 and European Patent No. EP2073848B1, the contents of each of which are herein incorporated by reference in their entirety. As a non-limiting example, the polymeric nanoparticle may have a high glass transition temperature such as the nanoparticles described in or nanoparticles made by the methods described in U.S. Pat. No. 8,518,963, the contents of which are herein incorporated by reference in their entirety. As another non-limiting example, the polymer nanoparticle for oral and parenteral formulations may be made by the methods described in European Patent No. EP2073848B1, the contents of which are herein incorporated by reference in their entirety.

[0975] In some embodiments, the RNA (e.g., mRNA) vaccines described herein may be formulated in nanoparticles used in imaging. The nanoparticles may be liposome nanoparticles such as those described in U.S. Patent Publication No US20130129636, herein incorporated by reference in its entirety. As a non-limiting example, the liposome may comprise gadolinium (III) 2-{4,7-bis-carboxymethyl-10-[(N,N-distearylamidomethyl-N′-amido-methyl]-1,4,7, 10-tetra-azacyclododec-1-yl}-acetic acid and a neutral, fully saturated phospholipid component (see, e.g., U.S. Patent Publication No US20130129636, the contents of which are herein incorporated by reference in their entirety).

[0976] In some embodiments, the nanoparticles which may be used in the present disclosure are formed by the methods described in U.S. Patent Application No. US20130130348, the contents of which are herein incorporated by reference in their entirety.

[0977] The nanoparticles of the present disclosure may further include nutrients such as, but not limited to, those which deficiencies can lead to health hazards from anemia to neural tube defects (see, e.g., the nanoparticles described in International Patent Publication No WO2013072929, the contents of which are herein incorporated by reference in their entirety). As a non-limiting example, the nutrient may be iron in the form of ferrous, ferric salts or elemental iron, iodine, folic acid, vitamins or micronutrients.

[0978] In some embodiments, the RNA (e.g., mRNA) vaccines of the present disclosure may be formulated in a swellable nanoparticle. The swellable nanoparticle may be, but is not limited to, those described in U.S. Pat. No. 8,440,231, the contents of which are herein incorporated by reference in their entirety. As a non-limiting embodiment, the swellable nanoparticle may be used for delivery of the RNA (e.g., mRNA) vaccines of the present disclosure to the pulmonary system (see, e.g., U.S. Pat. No. 8,440,231, the contents of which are herein incorporated by reference in their entirety).

[0979] The RNA (e.g., mRNA) vaccines of the present disclosure may be formulated in polyanhydride nanoparticles such as, but not limited to, those described in U.S. Pat. No. 8,449,916, the contents of which are herein incorporated by reference in their entirety.

[0980] The nanoparticles and microparticles of the present disclosure may be geometrically engineered to modulate macrophage and/or the immune response. In some embodiments, the geometrically engineered particles may have varied shapes, sizes and/or surface charges in order to incorporated the polynucleotides of the present disclosure for targeted delivery such as, but not limited to, pulmonary delivery (see, e.g., International Publication No WO2013082111, the contents of which are herein incorporated by reference in their entirety). Other physical features the geometrically engineering particles may have include, but are not limited to, fenestrations, angled arms, asymmetry and surface roughness, and charge which can alter the interactions with cells and tissues. As a non-limiting example, nanoparticles of the present disclosure may be made by the methods described in International Publication No WO2013082111, the contents of which are herein incorporated by reference in their entirety.

[0981] In some embodiments, the nanoparticles of the present disclosure may be water soluble nanoparticles such as, but not limited to, those described in International Publication No. WO2013090601, the contents of which are herein incorporated by reference in their entirety. The nanoparticles may be inorganic nanoparticles which have a compact and zwitterionic ligand in order to exhibit good water solubility. The nanoparticles may also have small hydrodynamic diameters (HD), stability with respect to time, pH, and salinity and a low level of non-specific protein binding.

[0982] In some embodiments the nanoparticles of the present disclosure may be developed by the methods described in U.S. Patent Publication No. US20130172406, the contents of which are herein incorporated by reference in their entirety.

[0983] In some embodiments, the nanoparticles of the present disclosure are stealth nanoparticles or target-specific stealth nanoparticles such as, but not limited to, those described in U.S. Patent Publication No. US20130172406, the contents of which are herein incorporated by reference in their entirety. The nanoparticles of the present disclosure may be made by the methods described in U.S. Patent Publication No. US20130172406, the contents of which are herein incorporated by reference in their entirety.

[0984] In some embodiments, the stealth or target-specific stealth nanoparticles may comprise a polymeric matrix. The polymeric matrix may comprise two or more polymers such as, but not limited to, polyethylenes, polycarbonates, polyanhydrides, polyhydroxyacids, polypropylfumerates, polycaprolactones, polyamides, polyacetals, polyethers, polyesters, poly(orthoesters), polycyanoacrylates, polyvinyl alcohols, polyurethanes, polyphosphazenes, polyacrylates, polymethacrylates, polycyanoacrylates, polyureas, polystyrenes, polyamines, polyesters, polyanhydrides, polyethers, polyurethanes, polymethacrylates, polyacrylates, polycyanoacrylates or combinations thereof.

[0985] In some embodiments, the nanoparticle may be a nanoparticle-nucleic acid hybrid structure having a high density nucleic acid layer. As a non-limiting example, the nanoparticle-nucleic acid hybrid structure may made by the methods described in U.S. Patent Publication No. US20130171646, the contents of which are herein incorporated by reference in their entirety. The nanoparticle may comprise a nucleic acid such as, but not limited to, polynucleotides described herein and/or known in the art.

[0986] At least one of the nanoparticles of the present disclosure may be embedded in the core of a nanostructure or coated with a low density porous 3-D structure or coating which is capable of carrying or associating with at least one payload within or on the surface of the nanostructure. Non-limiting examples of the nanostructures comprising at least one nanoparticle are described in International Patent Publication No. WO2013123523, the contents of which are herein incorporated by reference in their entirety.

[0987] In some embodiments the RNA (e.g., mRNA) vaccine may be associated with a cationic or polycationic compounds, including protamine, nucleoline, spermine or spermidine, or other cationic peptides or proteins, such as poly-L-lysine (PLL), polyarginine, basic polypeptides, cell penetrating peptides (CPPs), including HIV-binding peptides, HIV-1 Tat (HIV), Tat-derived peptides, Penetratin, VP²² derived or analog peptides, Pestivirus Erns, HSINV, VP²² (Herpes simplex), MAP, KALA or protein transduction domains (PTDs), PpT620, prolin-rich peptides, arginine-rich peptides, lysine-rich peptides, MPG-peptide(s), Pep-1, L-oligomers, Calcitonin peptide(s), Antennapedia-derived peptides (particularly from Drosophila antennapedia), pAntp, pIsl, FGF, Lactoferrin, Transportan, Buforin-2, Bac715-24, SynB, SynB, pVEC, hCT-derived peptides, SAP, histones, cationic polysaccharides, for example chitosan, polybrene, cationic polymers, e.g. polyethyleneimine (PEI), cationic lipids, e.g. DOTMA: [1-(2,3-sioleyloxy) propyl)]-N,N,N-trimethylammonium chloride, DMRIE, di-C14-amidine, DOTIM, SAINT, DC-Chol, BGTC, CTAP, DOPC, DODAP, DOPE: Dioleyl phosphatidylethanol-amine, DOSPA, DODAB, DOIC, DMEPC, DOGS: Dioctadecylamidoglicylspermin, DIMRI: Dimyristooxypropyl dimethyl hydroxyethyl ammonium bromide, DOTAP: dioleoyloxy-3-(trimethylammonio) propane, DC-6-14: O,O-ditetradecanoyl-N—. alpha.-trimethylammonioacetyl) diethanolamine chloride, CLIP 1: rac-[(2,3-dioctadecyloxypropyl) (2-hydroxyethyl)]-dimethylammonium chloride, CLIP6: rac-[2 (2,3-dihexadecyloxypropyloxymethyloxy)ethyl]-trimethylammonium, CLIP9: rac-[2 (2,3-dihexadecyloxypropyloxysuccinyloxy)ethyl]-trimethylammo-nium, oligofectamine, or cationic or polycationic polymers, e.g. modified polyaminoacids, such as beta-aminoacid-polymers or reversed polyamides, etc., modified polyethylenes, such as PVP (poly(N-ethyl-4-vinylpyridinium bromide)), etc., modified acrylates, such as pDMAEMA (poly(dimethylaminoethyl methylacrylate)), etc., modified amidoamines such as pAMAM (poly(amidoamine)), etc., modified polybetaminoester (PBAE), such as diamine end modified 1,4 butanediol diacrylate-co-5-amino-1-pentanol polymers, etc., dendrimers, such as polypropylamine dendrimers or pAMAM based dendrimers, etc., polyimine(s), such as PEI: poly(ethyleneimine), poly(propyleneimine), etc., polyallylamine, sugar backbone based polymers, such as cyclodextrin based polymers, dextran based polymers, chitosan, etc., silan backbone based polymers, such as PMOXA-PDMS copolymers, etc., blockpolymers consisting of a combination of one or more cationic blocks (e.g. selected from a cationic polymer as mentioned above) and of one or more hydrophilic or hydrophobic blocks (e.g. polyethyleneglycole), etc.

[0988] In other embodiments the RNA (e.g., mRNA) vaccine is not associated with a cationic or polycationic compounds.

[0989] In some embodiments, a nanoparticle comprises compounds of Formula (I):

[chemical structure]

[0990] or a salt or isomer thereof, wherein:
[0991] R₁ is selected from the group consisting of C₅₋₃₀ alkyl, C₅₋₂₀ alkenyl, —R*YR″, —YR″, and —R″M′R′;
[0992] R₂ and R₃ are independently selected from the group consisting of H, C₁₋₁₄ alkyl, C₂₋₁₄ alkenyl, —R*YR″, —YR″, and —R*OR″, or R₂ and R₃, together with the atom to which they are attached, form a heterocycle or carbocycle;
[0993] R₄ is selected from the group consisting of a C₃₋₆ carbocycle, —(CH₂)ₙQ, —(CH₂)ₙCHQR,
[0994] —CHQR, —CQ(R)₂, and unsubstituted C₁₋₆ alkyl, where Q is selected from a carbocycle, heterocycle, —OR, —O(CH₂)ₙN (R)₂, —C(O)OR, —OC(O)R, —CX₃, —CX₂H, —CXH₂, —CN, —N(R)₂, —C(O) N (R)₂, —N(R)C(O)R, —N(R)S(O)₂R, —N(R)C(O) N (R)₂, —N(R)C(S) N (R)₂, —N(R)R₈, —O(CH₂)ₙOR, —N(R)C(═NR₉)N (R)₂, —N(R)C(═CHR₉)N (R)₂, —OC(O)N (R)₂, —N(R)C(O)OR, —N(OR)C(O)R, —N(OR)S(O)₂R, —N(OR)C(O)OR, —N(OR)C(O)N(R)₂, —N(OR)C(S)N(R)₂, —N(OR)C(═NR₉)N(R)₂, —N(OR)C(═CHR₉)N(R)₂, —C(═NR₉)N(R)₂, —C(═NR₉)R, —C(O)N(R) O R, and —C(R)N(R)₂C(O)OR, and each n is independently selected from 1, 2, 3, 4, and 5;
[0995] each R₅ is independently selected from the group consisting of C₁₋₃ alkyl, C₂₋₃ alkenyl, and H;
[0996] each R₆ is independently selected from the group consisting of C₁₋₃ alkyl, C₂₋₃ alkenyl, and H;
[0997] M and M′ are independently selected from —C(O)O—, —OC(O)—, —C(O)N(R′)—,
[0998] —N(R′)C(O)—, —C(O)—, —C(S)—, —C(S)S—, —SC(S)—, —CH(OH)—, —P(O)(OR′)O—, —S(O)₂—, —S—S—, an aryl group, and a heteroaryl group;
[0999] R₇ is selected from the group consisting of C₁₋₃ alkyl, C₂₋₃ alkenyl, and H;
[1000] R₈ is selected from the group consisting of C₃₋₆ carbocycle and heterocycle;
[1001] R₉ is selected from the group consisting of H, CN, NO₂, C₁₋₆ alkyl, —OR, —S(O)₂R, —S(O)₂N(R)₂, C₂₋₆ alkenyl, C₃₋₆ carbocycle and heterocycle;
[1002] each R is independently selected from the group consisting of C₁₋₃ alkyl, C₂₋₃ alkenyl, and H;
[1003] each R′ is independently selected from the group consisting of C₁₋₁₈ alkyl, C₂₋₁₈ alkenyl, —R*YR″, —YR″, and H;
[1004] each R″ is independently selected from the group consisting of C₃₋₁₄ alkyl and C₃₋₁₄ alkenyl;
[1005] each R* is independently selected from the group consisting of C₁₋₁₂ alkyl and C₂₋₁₂ alkenyl;
[1006] each Y is independently a C₃₋₆ carbocycle;
[1007] each X is independently selected from the group consisting of F, Cl, Br, and I; and
[1008] m is selected from 5, 6, 7, 8, 9, 10, 11, 12, and 13.

[1009] In some embodiments, a subset of compounds of Formula (I) includes those in which when R₄ is —(CH₂)ₙQ, —(CH₂)ₙCHQR, —CHQR, or —CQ(R)₂, then (i) Q is not —N(R)₂ when n is 1, 2, 3, 4 or 5, or (ii) Q is not 5, 6, or 7-membered heterocycloalkyl when n is 1 or 2.

[1010] In some embodiments, another subset of compounds of Formula (I) includes those in which
[1011] R₁ is selected from the group consisting of C₅₋₃₀ alkyl, C₅₋₂₀ alkenyl, —R*YR″, —YR″, and —R″M′R′;
[1012] R₂ and R₃ are independently selected from the group consisting of H, C₁₋₁₄ alkyl, C₂₋₁₄ alkenyl, —R*YR″, —YR″, and —R*OR″, or R₂ and R₃, together with the atom to which they are attached, form a heterocycle or carbocycle;
[1013] R₄ is selected from the group consisting of a C₃₋₆ carbocycle, —(CH₂)ₙQ, —(CH₂)ₙCHQR,
   —CHQRₙ-CQ(R)₂, and unsubstituted C₁₋₆ alkyl, where Q is selected from a C₃₋₆ carbocycle, a 5- to 14-membered heteroaryl having one or more heteroatoms selected from N, O, and S, —OR,
   —O(CH₂)ₙN(R)₂, —C(O)OR, —OC(O)R, —CX₃, —CX₂H, —CXH₂, —CN, —C(O)N(R)₂, —N(R)C(O)R, —N(R)S(O)₂R, —N(R)C(O)N(R)₂, —N(R)C(S)N(R)₂, —CRN(R)₂C(O)OR, —N(R)R₈, —O(CH₂)ₙOR, —N(R)C(═NR₉)N(R)₂, —N(R)C(═CHR₉)N(R)₂, —OC(O)N(R)₂, —N(R)C(O)OR, —N(OR)C(O)R, —N(OR)S(O)₂R, —N(OR)C(O)OR, —N(OR)C(O)N(R)₂, —N(OR)C(S)N(R)₂, —N(OR)C(═NR₉)N(R)₂, —N(OR)C(═CHR₉)N(R)₂, —C(═NR₉)N(R)₂, —C(═NR₉)R, —C(O)N(R)OR, and a 5- to 14-membered heterocycloalkyl having one or more heteroatoms selected from N, O, and S which is substituted with one or more substituents selected from oxo (═O), OH, amino, mono- or di-alkylamino, and C₁₋₃ alkyl, and each n is independently selected from 1, 2, 3, 4, and 5;
[1014] each R₅ is independently selected from the group consisting of C₁₋₃ alkyl, C₂₋₃ alkenyl, and H;
[1015] each R₆ is independently selected from the group consisting of C₁₋₃ alkyl, C₂₋₃ alkenyl, and H;
[1016] M and M′ are independently selected from —C(O)O—, —OC(O)—, —C(O)N(R′)—, —N(R′) C(O)—, —C(O)—, —C(S)—, —C(S)S—, —SC(S)—, —CH(OH)—, —P(O)(OR′)O—, —S(O)₂—, —S—S—, an aryl group, and a heteroaryl group;
[1017] R₇ is selected from the group consisting of C₁₋₃ alkyl, C₂₋₃ alkenyl, and H;
[1018] R₈ is selected from the group consisting of C₃₋₆ carbocycle and heterocycle;
[1019] R₉ is selected from the group consisting of H, CN, NO₂, C₁₋₆ alkyl, —OR, —S(O)₂R, —S(O)₂N(R)₂, C₂₋₆ alkenyl, C₃₋₆ carbocycle and heterocycle;
[1020] each R is independently selected from the group consisting of C₁₋₃ alkyl, C₂₋₃ alkenyl, and H;
[1021] each R′ is independently selected from the group consisting of C₁₋₁₈ alkyl, C₂₋₁₈ alkenyl, —R*YR″, —YR″, and H;
[1022] each R″ is independently selected from the group consisting of C₃₋₁₄ alkyl and C₃₋₁₄ alkenyl;
[1023] each R* is independently selected from the group consisting of C₁₋₁₂ alkyl and C₂₋₁₂ alkenyl;
[1024] each Y is independently a C₃₋₆ carbocycle;
[1025] each X is independently selected from the group consisting of F, Cl, Br, and I; and
[1026] m is selected from 5, 6, 7, 8, 9, 10, 11, 12, and 13, or salts or isomers thereof.

[1027] In some embodiments, another subset of compounds of Formula (I) includes those in which
[1028] R₁ is selected from the group consisting of C₅₋₃₀ alkyl, C₅₋₂₀ alkenyl, —R*YR″, —YR″, and —R″M′R′;
[1029] R₂ and R₃ are independently selected from the group consisting of H, C₁₋₁₄ alkyl, C₂₋₁₄ alkenyl, —R*YR″, —YR″, and —R*OR″, or R₂ and R₃, together with the atom to which they are attached, form a heterocycle or carbocycle;
[1030] R₄ is selected from the group consisting of a C₃-6
   carbocycle, —(CH₂)ₙQ, —(CH₂)ₙCHQR,
   —CHQR, —CQ(R)₂, and unsubstituted C₁₋₆ alkyl, where Q is selected from a C₃₋₆ carbocycle, a 5- to 14-membered heterocycle having one or more heteroatoms selected from N, O, and S, —OR,
   —O(CH₂)ₙN(R)₂, —C(O)OR, —OC(O)R, —CX₃, —CX₂H, —CXH₂, —CN, —C(O)N(R)₂, —N(R)C(O)R, —N(R)S(O)₂R, —N(R)C(O)N(R)₂, —N(R)C(S)N(R)₂, —CRN(R)₂C(O)OR, —N(R)R₈, —O(CH₂)ₙOR, —N(R)C(═NR₉)N(R)₂, —N(R)C(═CHR₉)N(R)₂, —OC(O)N(R)₂, —N(R)C(O)OR, —N(OR)C(O)R, —N(OR)S(O)₂R, —N(OR)C(O)OR, —N(OR)C(O)N(R)₂, —N(OR)C(S)N(R)₂, —N(OR)C(═NR₉)N(R)₂, —N(OR)C(═CHR₉)N(R)₂, —C(═NR₉)R, —C(O)N(R) OR, and —C(═NR₉)N(R)₂, and each n is independently selected from 1, 2, 3, 4, and 5; and when Q is a 5- to 14-membered heterocycle and (i) R₄ is —(CH₂)ₙQ in which n is 1 or 2, or (ii) R₄ is —(CH₂)ₙCHQR in which n is 1, or (iii) R₄ is —CHQR, and —CQ(R)₂, then Q is either a 5- to 14-membered heteroaryl or 8- to 14-membered heterocycloalkyl;
[1031] each R₅ is independently selected from the group consisting of C₁₋₃ alkyl, C₂₋₃ alkenyl, and H;
[1032] each R₆ is independently selected from the group consisting of C₁₋₃ alkyl, C₂₋₃ alkenyl, and H;
[1033] M and M′ are independently selected from —C(O)O—, —OC(O)—, —C(O)N(R′)—, —N(R′) C(O)—, —C(O)—, —C(S)—, —C(S)S—, —SC(S)—, —CH(OH)—, —P(O)(OR′)O—, —S(O)₂—, —S—S—, an aryl group, and a heteroaryl group;
[1034] R₇ is selected from the group consisting of C₁₋₃ alkyl, C₂₋₃ alkenyl, and H;
[1035] R₈ is selected from the group consisting of C₃₋₆ carbocycle and heterocycle;
[1036] R₉ is selected from the group consisting of H, CN, NO₂, C₁₋₆ alkyl, —OR, —S(O)₂R, —S(O)₂N(R)₂, C₂₋₆ alkenyl, C₃₋₆ carbocycle and heterocycle;
[1037] each R is independently selected from the group consisting of C₁₋₃ alkyl, C₂₋₃ alkenyl, and H;
[1038] each R′ is independently selected from the group consisting of C₁₋₁₈ alkyl, C₂₋₁₈ alkenyl, —R*YR″, —YR″, and H;
[1039] each R″ is independently selected from the group consisting of C₃₋₁₄ alkyl and C₃₋₁₄ alkenyl;
[1040] each R* is independently selected from the group consisting of C₁₋₁₂ alkyl and C₂₋₁₂ alkenyl;
[1041] each Y is independently a C₃₋₆ carbocycle;
[1042] each X is independently selected from the group consisting of F, Cl, Br, and I; and
[1043] m is selected from 5, 6, 7, 8, 9, 10, 11, 12, and 13, or salts or isomers thereof.

[1044] In some embodiments, another subset of compounds of Formula (I) includes those in which
[1045] R₁ is selected from the group consisting of C₅₋₃₀ alkyl, C₅₋₂₀ alkenyl, —R*YR″, —YR″, and —R″M′R′;
[1046] R₂ and R₃ are independently selected from the group consisting of H, C₁₋₁₄ alkyl, C₂₋₁₄ alkenyl, —R*YR″, —YR″, and —R*OR″, or R₂ and R₃, together with the atom to which they are attached, form a heterocycle or carbocycle;
[1047] R₄ is selected from the group consisting of a C₃₋₆
   carbocycle, —(CH₂)ₙQ, —(CH₂)ₙCHQR,
   —CHQR, —CQ(R)₂, and unsubstituted C₁₋₆ alkyl, where Q is selected from a C₃₋₆ carbocycle, a 5- to 14-membered heteroaryl having one or more heteroatoms selected from N, O, and S, —OR,
   —O(CH₂)ₙN(R)₂, —C(O)OR, —OC(O)R, —CX₃, —CX₂H, —CXH₂, —CN, —C(O)N(R)₂, —N(R)C(O)R, —N(R)S(O)₂R, —N(R)C(O)N(R)₂, —N(R)C(S)N(R)₂, —CRN(R)₂C(O)OR, —N(R)R₈, —O(CH₂)ₙOR, —N(R)C(═NR₉)N(R)₂, —N(R)C(═CHR₉)N(R)₂, —OC(O)N(R)₂, —N(R)C(O)OR, —N(OR)C(O)R, —N(OR)S(O)₂R, —N(OR)C(O)OR, —N(OR)C(O)N(R)₂, —N(OR)C(S)N(R)₂, —N(OR)C(═NR₉)N(R)₂, —N(OR)C(═CHR₉)N(R)₂, —C(═NR₉)R, —C(O)N(R) OR, and —C(═NR₉)N(R)₂, and each n is independently selected from 1, 2, 3, 4, and 5;
[1048] each R₅ is independently selected from the group consisting of C₁₋₃ alkyl, C₂₋₃ alkenyl, and H;
[1049] each R₆ is independently selected from the group consisting of C₁₋₃ alkyl, C₂₋₃ alkenyl, and H;
[1050] M and M′ are independently selected from —C(O)O—, —OC(O)—, —C(O)N(R′)—, —N(R′) C(O)—, —C(O)—, —C(S)—, —C(S)S—, —SC(S)—, —CH(OH)—, —P(O)(OR′)O—, —S(O)₂—, —S—S—, an aryl group, and a heteroaryl group;
[1051] R₇ is selected from the group consisting of C₁₋₃ alkyl, C₂₋₃ alkenyl, and H;
[1052] R₈ is selected from the group consisting of C₃₋₆ carbocycle and heterocycle;
[1053] R₉ is selected from the group consisting of H, CN, NO₂, C₁₋₆ alkyl, —OR, —S(O)₂R, —S(O)₂N(R)₂, C₂₋₆ alkenyl, C₃₋₆ carbocycle and heterocycle;
[1054] each R is independently selected from the group consisting of C₁₋₃ alkyl, C₂₋₃ alkenyl, and H;
[1055] each R′ is independently selected from the group consisting of C₁₋₁₈ alkyl, C₂₋₁₈ alkenyl, —R*YR″, —YR″, and H;
[1056] each R″ is independently selected from the group consisting of C₃₋₁₄ alkyl and C₃₋₁₄ alkenyl;
[1057] each R* is independently selected from the group consisting of C₁₋₁₂ alkyl and C₂₋₁₂ alkenyl;
[1058] each Y is independently a C₃₋₆ carbocycle;
[1059] each X is independently selected from the group consisting of F, Cl, Br, and I; and
[1060] m is selected from 5, 6, 7, 8, 9, 10, 11, 12, and 13, or salts or isomers thereof.

[1061] In some embodiments, another subset of compounds of Formula (I) includes those in which
[1062] R₁ is selected from the group consisting of C₅₋₃₀ alkyl, C₅₋₂₀ alkenyl, —R*YR″, —YR″, and —R″M′R′;
[1063] R₂ and R₃ are independently selected from the group consisting of H, C₂₋₁₄ alkyl, C₂₋₁₄ alkenyl, —R*YR″, —YR″, and —R*OR″, or R₂ and R₃, together with the atom to which they are attached, form a heterocycle or carbocycle;
[1064] R₄ is —(CH₂)ₙQ or —(CH₂)ₙCHQR, where Q is —N(R)₂, and n is selected from 3, 4, and 5;
[1065] each R₅ is independently selected from the group consisting of C₁₋₃ alkyl, C₂₋₃ alkenyl, and H;
[1066] each R₆ is independently selected from the group consisting of C₁₋₃ alkyl, C₂₋₃ alkenyl, and H;
[1067] M and M′ are independently selected from —C(O)O—, —OC(O)—, —C(O)N(R′)—, —N(R′) C(O)—, —C(O)—, —C(S)—, —C(S)S—, —SC(S)—, —CH(OH)—, —P(O)(OR′)O—, —S(O)₂—, —S—S—, an aryl group, and a heteroaryl group;
[1068] R₇ is selected from the group consisting of C₁₋₃ alkyl, C₂₋₃ alkenyl, and H;
[1069] each R is independently selected from the group consisting of C₁₋₃ alkyl, C₂₋₃ alkenyl, and H;
[1070] each R′ is independently selected from the group consisting of C₁₋₁₈ alkyl, C₂₋₁₈ alkenyl, —R*YR″, —YR″, and H;
[1071] each R″ is independently selected from the group consisting of C₃₋₁₄ alkyl and C₃₋₁₄ alkenyl;
[1072] each R* is independently selected from the group consisting of C₁₋₁₂ alkyl and C₁₋₁₂ alkenyl;
[1073] each Y is independently a C₃₋₆ carbocycle;
[1074] each X is independently selected from the group consisting of F, Cl, Br, and I; and
[1075] m is selected from 5, 6, 7, 8, 9, 10, 11, 12, and 13,
[1076] or salts or isomers thereof.

[1077] In some embodiments, another subset of compounds of Formula (I) includes those in which
[1078] R₁ is selected from the group consisting of C₅₋₃₀ alkyl, C₅₋₂₀ alkenyl, —R*YR″, —YR″, and —R″M′R′;
[1079] R₂ and R₃ are independently selected from the group consisting of C₁₋₁₄ alkyl, C₂₋₁₄ alkenyl, —R*YR″, —YR″, and —R*OR″, or R₂ and R₃, together with the atom to which they are attached, form a heterocycle or carbocycle;
[1080] R₄ is selected from the group consisting of —(CH₂)ₙQ, —(CH₂)ₙCHQR, —CHQR, and —CQ(R)₂, where Q is —N(R)₂, and n is selected from 1, 2, 3, 4, and 5;
[1081] each R₅ is independently selected from the group consisting of C₁₋₃ alkyl, C₂₋₃ alkenyl, and H;
[1082] each R₆ is independently selected from the group consisting of C₁₋₃ alkyl, C₂₋₃ alkenyl, and H;
[1083] M and M′ are independently selected from —C(O)O—, —OC(O)—, —C(O)N(R′)—, —N(R′) C(O)—, —C(O)—, —C(S)—, —C(S)S—, —SC(S)—, —CH(OH)—, —P(O)(OR′)O—, —S(O)₂—, —S—S—, an aryl group, and a heteroaryl group;
[1084] R₇ is selected from the group consisting of C₁₋₃ alkyl, C₂₋₃ alkenyl, and H;
[1085] each R is independently selected from the group consisting of C₁₋₃ alkyl, C₂₋₃ alkenyl, and H;
[1086] each R′ is independently selected from the group consisting of C₁₋₁₈ alkyl, C₂₋₁₈ alkenyl, —R*YR″, —YR″, and H;
[1087] each R″ is independently selected from the group consisting of C₃₋₁₄ alkyl and C₃₋₁₄ alkenyl;
[1088] each R* is independently selected from the group consisting of C₁₋₁₂ alkyl and C₁₋₁₂ alkenyl;
[1089] each Y is independently a C₃₋₆ carbocycle;
[1090] each X is independently selected from the group consisting of F, Cl, Br, and I; and
[1091] m is selected from 5, 6, 7, 8, 9, 10, 11, 12, and 13,
[1092] or salts or isomers thereof.

[1093] In some embodiments, a subset of compounds of Formula (I) includes those of Formula (IA):

[chemical structure]

[1094] or a salt or isomer thereof, wherein 1 is selected from 1, 2, 3, 4, and 5; m is selected from 5, 6, 7, 8, and 9; M1 is a bond or M′; R₄ is unsubstituted C₁₋₃ alkyl, or —(CH₂)ₙQ, in which Q is OH, —NHC(S)N(R)₂, —NHC(O)N(R)₂, —N(R)C(O)R, —N(R)S(O)₂R, —N(R)R₈, —NHC(═NR₉)N(R)₂, —NHC(═CHR₉)N(R)₂, —OC(O)N(R)₂, —N(R)C(O)OR, heteroaryl or heterocycloalkyl; M and M′ are independently selected
   from —C(O)O—, —OC(O)—, —C(O)N(R′)—, —P(O)(OR′)O—, —S—S—, an aryl group, and a heteroaryl group; and R₂ and R₃ are independently selected from the group consisting of H, C₁₋₁₄ alkyl, and C₂₋₁₄ alkenyl.

[1095] In some embodiments, a subset of compounds of Formula (I) includes those of Formula (II):

[chemical structure]

or a salt or isomer thereof, wherein l is selected from 1, 2, 3, 4, and 5; M₁ is a bond or M′; R₄ is unsubstituted C₁₋₃ alkyl, or —(CH₂)ₙQ, in which n is 2, 3, or 4, and Q is
OH, —NHC(S)N(R)₂, —NHC(O)N(R)₂, —N(R)C(O)R, —N(R)S(O)₂R, —N(R)R₈, —NHC(═NR₉)N(R)₂, —NHC(═CHR₉)N(R)₂, —OC(O)N(R)₂, —N(R)C(O)OR, heteroaryl or heterocycloalkyl; M and M′ are independently selected
from —C(O)O—, —OC(O)—, —C(O)N(R′)—, —P(O)(OR′)O—, —S—S—, an aryl group, and a heteroaryl group; and R₂ and R₃ are independently selected from the group consisting of H, C₁₋₁₄ alkyl, and C₂₋₁₄ alkenyl.

[1096] In some embodiments, a subset of compounds of Formula (I) includes those of Formula (IIa), (IIb), (IIc), or (IIe):

[chemical structure]

[1097] or a salt or isomer thereof, wherein R₄ is as described herein.

[1098] In some embodiments, a subset of compounds of Formula (I) includes those of Formula (IId):

[chemical structure]

[1099] or a salt or isomer thereof, wherein n is 2, 3, or 4; and m, R′, R″, and R₂ through R₆ are as described herein. For example, each of R₂ and R₃ may be independently selected from the group consisting of C₅₋₁₄ alkyl and C₅₋₁₄ alkenyl.

[1100] In some embodiments, the compound of Formula (I) is selected from the group consisting of:

[chemical structure]

[chemical structure]

[chemical structure]

[chemical structure]

[chemical structure]

[chemical structure]

[chemical structure]

[chemical structure]

[chemical structure]

[chemical structure]

[chemical structure]

[1101] In further embodiments, the compound of Formula (I) is selected from the group consisting of:

[chemical structure]

[1102] In some embodiments, the compound of Formula (I) is selected from the group consisting of:

[chemical structure]

[chemical structure]

[chemical structure]

[chemical structure]

[chemical structure]

[chemical structure]

[chemical structure]

[chemical structure]

[chemical structure]

[chemical structure]

[chemical structure]

[chemical structure]

[chemical structure]

[chemical structure]

[chemical structure]

[chemical structure]

[chemical structure]

[chemical structure]

[chemical structure]

[chemical structure]

[chemical structure]

[chemical structure]

[chemical structure]

[chemical structure]

[chemical structure]

[chemical structure]

and salts and isomers thereof.

[1103] In some embodiments, a nanoparticle comprises the following compound:

[chemical structure]

or salts and isomers thereof.

[1104] In some embodiments, the disclosure features a nanoparticle composition including a lipid component comprising a compound as described herein (e.g., a compound according to Formula (I), (IA), (II), (IIa), (IIb), (IIc), (IId) or (IIe)).

[1105] In some embodiments, the disclosure features a pharmaceutical composition comprising a nanoparticle composition according to the preceding embodiments and a pharmaceutically acceptable carrier. For example, the pharmaceutical composition is refrigerated or frozen for storage and/or shipment (e.g., being stored at a temperature of 4° C. or lower, such as a temperature between about −150° C. and about 0° C. or between about −80° C. and about −20° C. (e.g., about −5° C., −10° C., −15° C., −20° C., −25° C., −30° C., −40° C., −50° C., −60° C., −70° C., −80° C., −90° C., −130° C. or −150° C.). For example, the pharmaceutical composition is a solution that is refrigerated for storage and/or shipment at, for example, about −20° C., −30° C., −40° C., −50° C., −60° C., −70° C., or −80° C.

[1106] In some embodiments, the disclosure provides a method of delivering a therapeutic and/or prophylactic (e.g., RNA, such as mRNA) to a cell (e.g., a mammalian cell). This method includes the step of administering to a subject (e.g., a mammal, such as a human) a nanoparticle composition including (i) a lipid component including a phospholipid (such as a polyunsaturated lipid), a PEG lipid, a structural lipid, and a compound of Formula (I), (IA), (II), (IIa), (IIb), (IIc), (IId) or (IIe) and (ii) a therapeutic and/or prophylactic, in which administering involves contacting the cell with the nanoparticle composition, whereby the therapeutic and/or prophylactic is delivered to the cell.

[1107] In some embodiments, the disclosure provides a method of producing a polypeptide of interest in a cell (e.g., a mammalian cell). The method includes the step of contacting the cell with a nanoparticle composition including (i) a lipid component including a phospholipid (such as a polyunsaturated lipid), a PEG lipid, a structural lipid, and a compound of Formula (I), (IA), (II), (IIa), (IIb), (IIc), (IId) or (IIe) and (ii) an mRNA encoding the polypeptide of interest, whereby the mRNA is capable of being translated in the cell to produce the polypeptide.

[1108] In some embodiments, the disclosure provides a method of treating a disease or disorder in a mammal (e.g., a human) in need thereof. The method includes the step of administering to the mammal a therapeutically effective amount of a nanoparticle composition including (i) a lipid component including a phospholipid (such as a polyunsaturated lipid), a PEG lipid, a structural lipid, and a compound of Formula (I), (IA), (II), (IIa), (IIb), (IIc), (IId) or (IIe) and (ii) a therapeutic and/or prophylactic (e.g., an mRNA). In some embodiments, the disease or disorder is characterized by dysfunctional or aberrant protein or polypeptide activity. For example, the disease or disorder is selected from the group consisting of rare diseases, infectious diseases, cancer and proliferative diseases, genetic diseases (e.g., cystic fibrosis), autoimmune diseases, diabetes, neurodegenerative diseases, cardio- and reno-vascular diseases, and metabolic diseases.

[1109] In some embodiments, the disclosure provides a method of delivering (e.g., specifically delivering) a therapeutic and/or prophylactic to a mammalian organ (e.g., a liver, spleen, lung, or femur). This method includes the step of administering to a subject (e.g., a mammal) a nanoparticle composition including (i) a lipid component including a phospholipid, a PEG lipid, a structural lipid, and a compound of Formula (I), (IA), (II), (IIa), (IIb), (IIc), (IId) or (IIe) and (ii) a therapeutic and/or prophylactic (e.g., an mRNA), in which administering involves contacting the cell with the nanoparticle composition, whereby the therapeutic and/or prophylactic is delivered to the target organ (e.g., a liver, spleen, lung, or femur).

[1110] In some embodiments, the disclosure features a method for the enhanced delivery of a therapeutic and/or prophylactic (e.g., an mRNA) to a target tissue (e.g., a liver, spleen, lung, or femur). This method includes administering to a subject (e.g., a mammal) a nanoparticle composition, the composition including (i) a lipid component including a compound of Formula (I), (IA), (II), (IIa), (IIb), (IIc), (IId) or (Ile), a phospholipid, a structural lipid, and a PEG lipid; and (ii) a therapeutic and/or prophylactic, the administering including contacting the target tissue with the nanoparticle composition, whereby the therapeutic and/or prophylactic is delivered to the target tissue.

[1111] In some embodiments, the disclosure features a method of lowering immunogenicity comprising introducing the nanoparticle composition of the disclosure into cells, wherein the nanoparticle composition reduces the induction of the cellular immune response of the cells to the nanoparticle composition, as compared to the induction of the cellular immune response in cells induced by a reference composition which comprises a reference lipid instead of a compound of Formula (I), (IA), (II), (IIa), (IIb), (IIc), (IId) or (IIe). For example, the cellular immune response is an innate immune response, an adaptive immune response, or both.

[1112] The disclosure also includes methods of synthesizing a compound of Formula (I), (IA), (II), (IIa), (IIb), (IIc), (IId) or (IIe) and methods of making a nanoparticle composition including a lipid component comprising the compound of Formula (I), (IA), (II), (IIa), (IIb), (IIc), (IId) or (IIe).

### Modes of Vaccine Administration

[1113] Tropical disease RNA (e.g. mRNA) vaccines may be administered by any route which results in a therapeutically effective outcome. These include, but are not limited, to intradermal, intramuscular, intranasal and/or subcutaneous administration. The present disclosure provides methods comprising administering RNA (e.g., mRNA) vaccines to a subject in need thereof. The exact amount required will vary from subject to subject, depending on the species, age, and general condition of the subject, the severity of the disease, the particular composition, its mode of administration, its mode of activity, and the like. Tropical disease RNA (e.g., mRNA) vaccines compositions are typically formulated in dosage unit form for ease of administration and uniformity of dosage. It will be understood, however, that the total daily usage of RNA (e.g., mRNA) vaccine compositions may be decided by the attending physician within the scope of sound medical judgment. The specific therapeutically effective, prophylactically effective, or appropriate imaging dose level for any particular patient will depend upon a variety of factors including the disorder being treated and the severity of the disorder; the activity of the specific compound employed; the specific composition employed; the age, body weight, general health, sex and diet of the patient; the time of administration, route of administration, and rate of excretion of the specific compound employed; the duration of the treatment; drugs used in combination or coincidental with the specific compound employed; and like factors well known in the medical arts.

[1114] In some embodiments, tropical disease RNA (e.g. mRNA) vaccines compositions may be administered at dosage levels sufficient to deliver 0.0001 mg/kg to 100 mg/kg, 0.001 mg/kg to 0.05 mg/kg, 0.005 mg/kg to 0.05 mg/kg, 0.001 mg/kg to 0.005 mg/kg, 0.05 mg/kg to 0.5 mg/kg, 0.01 mg/kg to 50 mg/kg, 0.1 mg/kg to 40 mg/kg, 0.5 mg/kg to 30 mg/kg, 0.01 mg/kg to 10 mg/kg, 0.1 mg/kg to 10 mg/kg, or 1 mg/kg to 25 mg/kg, of subject body weight per day, one or more times a day, per week, per month, etc. to obtain the desired therapeutic, diagnostic, prophylactic, or imaging effect (see, e.g., the range of unit doses described in International Publication No WO2013078199, the contents of which are herein incorporated by reference in their entirety). The desired dosage may be delivered three times a day, two times a day, once a day, every other day, every third day, every week, every two weeks, every three weeks, every four weeks, every 2 months, every three months, every 6 months, etc. In some embodiments, the desired dosage may be delivered using multiple administrations (e.g., two, three, four, five, six, seven, eight, nine, ten, eleven, twelve, thirteen, fourteen, or more administrations). When multiple administrations are employed, split dosing regimens such as those described herein may be used. In exemplary embodiments, tropical disease RNA (e.g., mRNA) vaccines compositions may be administered at dosage levels sufficient to deliver 0.0005 mg/kg to 0.01 mg/kg, e.g., about 0.0005 mg/kg to about 0.0075 mg/kg, e.g., about 0.0005 mg/kg, about 0.001 mg/kg, about 0.002 mg/kg, about 0.003 mg/kg, about 0.004 mg/kg or about 0.005 mg/kg.

[1115] In some embodiments, tropical disease RNA (e.g., mRNA) vaccine compositions may be administered once or twice (or more) at dosage levels sufficient to deliver 0.025 mg/kg to 0.250 mg/kg, 0.025 mg/kg to 0.500 mg/kg, 0.025 mg/kg to 0.750 mg/kg, or 0.025 mg/kg to 1.0 mg/kg.

[1116] In some embodiments, tropical disease RNA (e.g., mRNA) vaccine compositions may be administered twice (e.g., Day 0 and Day 7, Day 0 and Day 14, Day 0 and Day 21, Day 0 and Day 28, Day 0 and Day 60, Day 0 and Day 90, Day 0 and Day 120, Day 0 and Day 150, Day 0 and Day 180, Day 0 and 3 months later, Day 0 and 6 months later, Day 0 and 9 months later, Day 0 and 12 months later, Day 0 and 18 months later, Day 0 and 2 years later, Day 0 and 5 years later, or Day 0 and 10 years later) at a total dose of or at dosage levels sufficient to deliver a total dose of 0.0100 mg, 0.025 mg, 0.050 mg, 0.075 mg, 0.100 mg, 0.125 mg, 0.150 mg, 0.175 mg, 0.200 mg, 0.225 mg, 0.250 mg, 0.275 mg, 0.300 mg, 0.325 mg, 0.350 mg, 0.375 mg, 0.400 mg, 0.425 mg, 0.450 mg, 0.475 mg, 0.500 mg, 0.525 mg, 0.550 mg, 0.575 mg, 0.600 mg, 0.625 mg, 0.650 mg, 0.675 mg, 0.700 mg, 0.725 mg, 0.750 mg, 0.775 mg, 0.800 mg, 0.825 mg, 0.850 mg, 0.875 mg, 0.900 mg, 0.925 mg, 0.950 mg, 0.975 mg, or 1.0 mg. Higher and lower dosages and frequency of administration are encompassed by the present disclosure. For example, a tropical disease RNA (e.g., mRNA) vaccine composition may be administered three or four times.

[1117] In some embodiments, tropical disease RNA (e.g., mRNA) vaccine compositions may be administered twice (e.g., Day 0 and Day 7, Day 0 and Day 14, Day 0 and Day 21, Day 0 and Day 28, Day 0 and Day 60, Day 0 and Day 90, Day 0 and Day 120, Day 0 and Day 150, Day 0 and Day 180, Day 0 and 3 months later, Day 0 and 6 months later, Day 0 and 9 months later, Day 0 and 12 months later, Day 0 and 18 months later, Day 0 and 2 years later, Day 0 and 5 years later, or Day 0 and 10 years later) at a total dose of or at dosage levels sufficient to deliver a total dose of 0.010 mg, 0.025 mg, 0.100 mg or 0.400 mg.

[1118] In some embodiments, the tropical disease RNA (e.g., mRNA) vaccine for use in a method of vaccinating a subject is administered to the subject as a single dosage of between 10 μg/kg and 400 μg/kg of the nucleic acid vaccine (in an effective amount to vaccinate the subject). In some embodiments the RNA (e.g., mRNA) vaccine for use in a method of vaccinating a subject is administered to the subject as a single dosage of between 10 μg and 400 μg of the nucleic acid vaccine (in an effective amount to vaccinate the subject). In some embodiments, a tropical disease RNA (e.g., mRNA) vaccine for use in a method of vaccinating a subject is administered to the subject as a single dosage of 25-1000 μg (e.g., a single dosage of mRNA encoding Malaria (e.g., P. falciparum, P. vivax, P. malariae and/or P. ovale), JEV, WNV, EEEV, VEEV, SINV, CHIKV, DENV, ZIKV and/or YFV antigen). In some embodiments, a tropical disease RNA (e.g., mRNA) vaccine is administered to the subject as a single dosage of 25, 50, 100, 150, 200, 250, 300, 350, 400, 450, 500, 550, 600, 650, 700, 750, 800, 850, 900, 950 or 1000 μg. For example, a tropical disease RNA (e.g., mRNA) vaccine may be administered to a subject as a single dose of 25-100, 25-500, 50-100, 50-500, 50-1000, 100-500, 100-1000, 250-500, 250-1000, or 500-1000 μg. In some embodiments, a tropical disease RNA (e.g., mRNA) vaccine for use in a method of vaccinating a subject is administered to the subject as two dosages, the combination of which equals 25-1000 μg of the tropical disease RNA (e.g., mRNA) vaccine.

[1119] A tropical disease RNA (e.g. mRNA) vaccine pharmaceutical composition described herein can be formulated into a dosage form described herein, such as an intranasal, intratracheal, or injectable (e.g., intravenous, intraocular, intravitreal, intramuscular, intradermal, intracardiac, intraperitoneal, intranasal and subcutaneous).

Tropical Disease RNA (e.g., mRNA) Vaccine Formulations and Methods of Use

[1120] Some aspects of the present disclosure provide formulations of the tropical disease RNA (e.g., mRNA) vaccine, wherein the RNA (e.g., mRNA) vaccine is formulated in an effective amount to produce an antigen specific immune response in a subject (e.g., production of antibodies specific to an Malaria (e.g., P. falciparum, P. vivax, P. malariae and/or P. ovale), JEV, WNV, EEEV, VEEV, SINV, CHIKV, DENV, ZIKV and/or YFV antigenic polypeptide). An “effective amount” is a dose of an RNA (e.g., mRNA) vaccine effective to produce an antigen-specific immune response. Also provided herein are methods of inducing an antigen-specific immune response in a subject.

[1121] In some embodiments, the antigen-specific immune response is characterized by measuring an anti-Malaria (e.g., P. falciparum, P. vivax, P. malariae and/or P. ovale), JEV, WNV, EEEV, VEEV, SINV, CHIKV, DENV, ZIKV and/or YFV antigenic polypeptide antibody titer produced in a subject administered a tropical disease RNA (e.g., mRNA) vaccine as provided herein. An antibody titer is a measurement of the amount of antibodies within a subject, for example, antibodies that are specific to a particular antigen (e.g., an Malaria (e.g., P. falciparum, P. vivax, P. malariae and/or P. ovale), JEV, WNV, EEEV, VEEV, SINV, CHIKV, DENV, ZIKV and/or YFV antigenic polypeptide) or epitope of an antigen. Antibody titer is typically expressed as the inverse of the greatest dilution that provides a positive result. Enzyme-linked immunosorbent assay (ELISA) is a common assay for determining antibody titers, for example.

[1122] In some embodiments, an antibody titer is used to assess whether a subject has had an infection or to determine whether immunizations are required. In some embodiments, an antibody titer is used to determine the strength of an autoimmune response, to determine whether a booster immunization is needed, to determine whether a previous vaccine was effective, and to identify any recent or prior infections. In accordance with the present disclosure, an antibody titer may be used to determine the strength of an immune response induced in a subject by the tropical disease RNA (e.g., mRNA) vaccine.

[1123] In some embodiments, an anti-antigenic polypeptide (e.g., an anti-Malaria (e.g., P. falciparum, P. vivax, P. malariae and/or P. ovale), JEV, WNV, EEEV, VEEV, SINV, CHIKV, DENV, ZIKV and/or YFV antigenic polypeptide) antibody titer produced in a subject is increased by at least 1 log relative to a control. For example, anti-antigenic polypeptide antibody titer produced in a subject may be increased by at least 1.5, at least 2, at least 2.5, or at least 3 log relative to a control. In some embodiments, the anti-antigenic polypeptide antibody titer produced in the subject is increased by 1, 1.5, 2, 2.5 or 3 log relative to a control. In some embodiments, the anti-antigenic polypeptide antibody titer produced in the subject is increased by 1-3 log relative to a control. For example, the anti-antigenic polypeptide antibody titer produced in a subject may be increased by 1-1.5, 1-2, 1-2.5, 1-3, 1.5-2, 1.5-2.5, 1.5-3, 2-2.5, 2-3, or 2.5-3 log relative to a control.

[1124] In some embodiments, the anti-antigenic polypeptide (e.g., an anti-Malaria (e.g., P. falciparum, P. vivax, P. malariae and/or P. ovale), JEV, WNV, EEEV, VEEV, SINV, CHIKV, DENV, ZIKV and/or YFV antigenic polypeptide) antibody titer produced in a subject is increased at least 2 times relative to a control. For example, the anti-antigenic polypeptide antibody titer produced in a subject may be increased at least 3 times, at least 4 times, at least 5 times, at least 6 times, at least 7 times, at least 8 times, at least 9 times, or at least 10 times relative to a control. In some embodiments, the anti-antigenic polypeptide antibody titer produced in the subject is increased 2, 3, 4, 5, 6, 7, 8, 9, or 10 times relative to a control. In some embodiments, the anti-antigenic polypeptide antibody titer produced in a subject is increased 2-10 times relative to a control. For example, the anti-antigenic polypeptide antibody titer produced in a subject may be increased 2-10, 2-9, 2-8, 2-7, 2-6, 2-5, 2-4, 2-3, 3-10, 3-9, 3-8, 3-7, 3-6, 3-5, 3-4, 4-10, 4-9, 4-8, 4-7, 4-6, 4-5, 5-10, 5-9, 5-8, 5-7, 5-6, 6-10, 6-9, 6-8, 6-7, 7-10, 7-9, 7-8, 8-10, 8-9, or 9-10 times relative to a control.

[1125] A control, in some embodiments, is the anti-antigenic polypeptide (e.g., an anti-Malaria (e.g., P. falciparum, P. vivax, P. malariae and/or P. ovale), JEV, WNV, EEEV, VEEV, SINV, CHIKV, DENV, ZIKV and/or YFV antigenic polypeptide) antibody titer produced in a subject who has not been administered a tropical disease RNA (e.g., mRNA) vaccine of the present disclosure. In some embodiments, a control is an anti-antigenic polypeptide (e.g., an anti-Malaria (e.g., P. falciparum, P. vivax, P. malariae and/or P. ovale), JEV, WNV, EEEV, VEEV, SINV, CHIKV, DENV, ZIKV and/or YFV antigenic polypeptide) antibody titer produced in a subject who has been administered a live attenuated Malaria (e.g., P. falciparum, P. vivax, P. malariae and/or P. ovale), JEV, WNV, EEEV, VEEV, SINV, CHIKV, DENV, ZIKV and/or YFV vaccine. An attenuated vaccine is a vaccine produced by reducing the virulence of a viable (live) virus. An attenuated virus is altered in a manner that renders it harmless or less virulent relative to a live, unmodified virus. In some embodiments, a control is an anti-antigenic polypeptide (e.g., an anti-Malaria (e.g., P. falciparum, P. vivax, P. malariae and/or P. ovale), JEV, WNV, EEEV, VEEV, SINV, CHIKV, DENV, ZIKV and/or YFV antigenic polypeptide) antibody titer produced in a subject administered inactivated Malaria (e.g., P. falciparum, P. vivax, P. malariae and/or P. ovale), JEV, WNV, EEEV, VEEV, SINV, CHIKV, DENV, ZIKV and/or YFV vaccine. In some embodiments, a control is an anti-antigenic polypeptide (e.g., an anti-Malaria (e.g., P. falciparum, P. vivax, P. malariae and/or P. ovale), JEV, WNV, EEEV, VEEV, SINV, CHIKV, DENV, ZIKV and/or YFV antigenic polypeptide) antibody titer produced in a subject administered a recombinant or purified Malaria (e.g., P. falciparum, P. vivax, P. malariae and/or P. ovale), JEV, WNV, EEEV, VEEV, SINV, CHIKV, DENV, ZIKV and/or YFV protein vaccine. Recombinant protein vaccines typically include protein antigens that either have been produced in a heterologous expression system (e.g., bacteria or yeast) or purified from large amounts of the pathogenic organism. In some embodiments, a control is an anti-antigenic polypeptide (e.g., an anti-Malaria (e.g., P. falciparum, P. vivax, P. malariae and/or P. ovale), JEV, WNV, EEEV, VEEV, SINV, CHIKV, DENV, ZIKV and/or YFV antigenic polypeptide) antibody titer produced in a subject who has been administered an Malaria (e.g., P. falciparum, P. vivax, P. malariae and/or P. ovale), JEV, WNV, EEEV, VEEV, SINV, CHIKV, DENV, ZIKV and/or YFV virus-like particle (VLP) vaccine.

[1126] In some embodiments, an effective amount of a tropical disease RNA (e.g., mRNA) vaccine is a dose that is reduced compared to the standard of care dose of a recombinant Malaria (e.g., P. falciparum, P. vivax, P. malariae and/or P. ovale), JEV, WNV, EEEV, VEEV, SINV, CHIKV, DENV, ZIKV and/or YFV protein vaccine. A “standard of care,” as provided herein, refers to a medical or psychological treatment guideline and can be general or specific. “Standard of care” specifies appropriate treatment based on scientific evidence and collaboration between medical professionals involved in the treatment of a given condition. It is the diagnostic and treatment process that a physician/clinician should follow for a certain type of patient, illness or clinical circumstance. A “standard of care dose,” as provided herein, refers to the dose of a recombinant or purified Malaria (e.g., P. falciparum, P. vivax, P. malariae and/or P. ovale), JEV, WNV, EEEV, VEEV, SINV, CHIKV, DENV, ZIKV and/or YFV protein vaccine, or a live attenuated or inactivated Malaria (e.g., P. falciparum, P. vivax, P. malariae and/or P. ovale), JEV, WNV, EEEV, VEEV, SINV, CHIKV, DENV, ZIKV and/or YFV vaccine, that a physician/clinician or other medical professional would administer to a subject to treat or prevent Malaria (e.g., P. falciparum, P. vivax, P. malariae and/or P. ovale), JEV, WNV, EEEV, VEEV, SINV, CHIKV, DENV, ZIKV and/or YFV, or a related condition, while following the standard of care guideline for treating or preventing Malaria (e.g., P. falciparum, P. vivax, P. malariae and/or P. ovale), JEV, WNV, EEEV, VEEV, SINV, CHIKV, DENV, ZIKV and/or YFV, or a related condition.

[1127] In some embodiments, the anti-antigenic polypeptide (e.g., an anti-Malaria (e.g., P. falciparum, P. vivax, P. malariae and/or P. ovale), JEV, WNV, EEEV, VEEV, SINV, CHIKV, DENV, ZIKV and/or YFV antigenic polypeptide) antibody titer produced in a subject administered an effective amount of a tropical disease RNA (e.g., mRNA) vaccine is equivalent to an anti-antigenic polypeptide (e.g., an anti-Malaria (e.g., P. falciparum, P. vivax, P. malariae and/or P. ovale), JEV, WNV, EEEV, VEEV, SINV, CHIKV, DENV, ZIKV and/or YFV antigenic polypeptide) antibody titer produced in a control subject administered a standard of care dose of a recombinant or purified Malaria (e.g., P. falciparum, P. vivax, P. malariae and/or P. ovale), JEV, WNV, EEEV, VEEV, SINV, CHIKV, DENV, ZIKV and/or YFV protein vaccine or a live attenuated or inactivated Malaria (e.g., P. falciparum, P. vivax, P. malariae and/or P. ovale), JEV, WNV, EEEV, VEEV, SINV, CHIKV, DENV, ZIKV and/or YFV vaccine.

[1128] In some embodiments, an effective amount of a tropical disease RNA (e.g., mRNA) vaccine is a dose equivalent to an at least 2-fold reduction in a standard of care dose of a recombinant or purified Malaria (e.g., P. falciparum, P. vivax, P. malariae and/or P. ovale), JEV, WNV, EEEV, VEEV, SINV, CHIKV, DENV, ZIKV and/or YFV protein vaccine. For example, an effective amount of a tropical disease RNA (e.g., mRNA) vaccine may be a dose equivalent to an at least 3-fold, at least 4-fold, at least 5-fold, at least 6-fold, at least 7-fold, at least 8-fold, at least 9-fold, or at least 10-fold reduction in a standard of care dose of a recombinant or purified Malaria (e.g., P. falciparum, P. vivax, P. malariae and/or P. ovale), JEV, WNV, EEEV, VEEV, SINV, CHIKV, DENV, ZIKV and/or YFV protein vaccine. In some embodiments, an effective amount of a tropical disease RNA (e.g., mRNA) vaccine is a dose equivalent to an at least at least 100-fold, at least 500-fold, or at least 1000-fold reduction in a standard of care dose of a recombinant or purified Malaria (e.g., P. falciparum, P. vivax, P. malariae and/or P. ovale), JEV, WNV, EEEV, VEEV, SINV, CHIKV, DENV, ZIKV and/or YFV protein vaccine. In some embodiments, an effective amount of a tropical disease RNA (e.g., mRNA) vaccine is a dose equivalent to a 2-, 3-, 4-, 5-, 6-, 7-, 8-, 9-, 10-, 20-, 50-, 100-, 250-, 500-, or 1000-fold reduction in a standard of care dose of a recombinant or purified Malaria (e.g., P. falciparum, P. vivax, P. malariae and/or P. ovale), JEV, WNV, EEEV, VEEV, SINV, CHIKV, DENV, ZIKV and/or YFV protein vaccine. In some embodiments, the anti-antigenic polypeptide antibody titer produced in a subject administered an effective amount of a tropical disease RNA (e.g., mRNA) vaccine is equivalent to an anti-antigenic polypeptide antibody titer produced in a control subject administered the standard of care dose of a recombinant or protein Malaria (e.g., P. falciparum, P. vivax, P. malariae and/or P. ovale), JEV, WNV, EEEV, VEEV, SINV, CHIKV, DENV, ZIKV and/or YFV protein vaccine or a live attenuated or inactivated Malaria (e.g., P. falciparum, P. vivax, P. malariae and/or P. ovale), JEV, WNV, EEEV, VEEV, SINV, CHIKV, DENV, ZIKV and/or YFV vaccine. In some embodiments, an effective amount of a tropical disease RNA (e.g., mRNA) vaccine is a dose equivalent to a 2-fold to 1000-fold (e.g., 2-fold to 100-fold, 10-fold to 1000-fold) reduction in the standard of care dose of a recombinant or purified Malaria (e.g., P. falciparum, P. vivax, P. malariae and/or P. ovale), JEV, WNV, EEEV, VEEV, SINV, CHIKV, DENV, ZIKV and/or YFV protein vaccine, wherein the anti-antigenic polypeptide antibody titer produced in the subject is equivalent to an anti-antigenic polypeptide antibody titer produced in a control subject administered the standard of care dose of a recombinant or purified Malaria (e.g., P. falciparum, P. vivax, P. malariae and/or P. ovale), JEV, WNV, EEEV, VEEV, SINV, CHIKV, DENV, ZIKV and/or YFV protein vaccine or a live attenuated or inactivated Malaria (e.g., P. falciparum, P. vivax, P. malariae and/or P. ovale), JEV, WNV, EEEV, VEEV, SINV, CHIKV, DENV, ZIKV and/or YFV vaccine.

[1129] In some embodiments, the effective amount of a tropical disease RNA (e.g., mRNA) vaccine is a dose equivalent to a 2 to 1000-, 2 to 900-, 2 to 800-, 2 to 700-, 2 to 600-, 2 to 500-, 2 to 400-, 2 to 300-, 2 to 200-, 2 to 100-, 2 to 90-, 2 to 80-, 2 to 70-, 2 to 60-, 2 to 50-, 2 to 40-, 2 to 30-, 2 to 20-, 2 to 10-, 2 to 9-, 2 to 8-, 2 to 7-, 2 to 6-, 2 to 5-, 2 to 4-, 2 to 3-, 3 to 1000-, 3 to 900-, 3 to 800-, 3 to 700-, 3 to 600-, 3 to 500-, 3 to 400-, 3 to 3 to 00-, 3 to 200-, 3 to 100-, 3 to 90-, 3 to 80-, 3 to 70-, 3 to 60-, 3 to 50-, 3 to 40-, 3 to 30-, 3 to 20-, 3 to 10-, 3 to 9-, 3 to 8-, 3 to 7-, 3 to 6-, 3 to 5-, 3 to 4-, 4 to 1000-, 4 to 900-, 4 to 800-, 4 to 700-, 4 to 600- , 4 to 500-, 4 to 400-, 4 to 4 to 00-, 4 to 200-, 4 to 100-, 4 to 90-, 4 to 80-, 4 to 70-, 4 to 60-, 4 to 50-, 4 to 40-, 4 to 30-, 4 to 20-, 4 to 10-, 4 to 9-, 4 to 8-, 4 to 7-, 4 to 6-, 4 to 5-, 4 to 4-, 5 to 1000-, 5 to 900-, 5 to 800-, 5 to 700-, 5 to 600-, 5 to 500-, 5 to 400-, 5 to 300-, 5 to 200-, 5 to 100-, 5 to 90-, 5 to 80-, 5 to 70-, 5 to 60-, 5 to 50-, 5 to 40-, 5 to 30-, 5 to 20-, 5 to 10-, 5 to 9- , 5 to 8-, 5 to 7-, 5 to 6-, 6 to 1000-, 6 to 900-, 6 to 800-, 6 to 700-, 6 to 600-, 6 to 500-, 6 to 400-, 6 to 300-, 6 to 200-, 6 to 100-, 6 to 90-, 6 to 80-, 6 to 70-, 6 to 60-, 6 to 50-, 6 to 40-, 6 to 30-, 6 to 20-, 6 to 10-, 6 to 9-, 6 to 8-, 6 to 7-, 7 to 1000-, 7 to 900-, 7 to 800-, 7 to 700-, 7 to 600-, 7 to 500-, 7 to 400-, 7 to 300-, 7 to 200-, 7 to 100-, 7 to 90-, 7 to 80-, 7 to 70-, 7 to 60-, 7 to 50-, 7 to 40-, 7 to 30-, 7 to 20-, 7 to 10-, 7 to 9-, 7 to 8-, 8 to 1000-, 8 to 900-, 8 to 800-, 8 to 700-, 8 to 600-, 8 to 500-, 8 to 400-, 8 to 300-, 8 to 200-, 8 to 100-, 8 to 90-, 8 to 80-, 8 to 70-, 8 to 60-, 8 to 50-, 8 to 40-, 8 to 30-, 8 to 20-, 8 to 10-, 8 to 9-, 9 to 1000-, 9 to 900-, 9 to 800-, 9 to 700-, 9 to 600-, 9 to 500-, 9 to 400-, 9 to 300-, 9 to 200-, 9 to 100-, 9 to 90-, 9 to 80-, 9 to 70-, 9 to 60-, 9 to 50-, 9 to 40-, 9 to 30-, 9 to 20-, 9 to 10-, 10 to 1000-, 10 to 900-, 10 to 800-, 10 to 700-, 10 to 600-, 10 to 500-, 10 to 400-, 10 to 300-, 10 to 200-, 10 to 100-, 10 to 90-, 10 to 80-, 10 to 70-, 10 to 60-, 10 to 50-, 10 to 40-, 10 to 30-, 10 to 20-, 20 to 1000-, 20 to 900-, 20 to 800-, 20 to 700-, 20 to 600-, 20 to 500-, 20 to 400-, 20 to 300-, 20 to 200-, 20 to 100-, 20 to 90-, 20 to 80-, 20 to 70-, 20 to 60-, 20 to 50-, 20 to 40-, 20 to 30-, 30 to 1000-, 30 to 900-, 30 to 800-, 30 to 700-, 30 to 600-, 30 to 500-, 30 to 400-, 30 to 300-, 30 to 200-, 30 to 100-, 30 to 90-, 30 to 80-, 30 to 70-, 30 to 60-, 30 to 50-, 30 to 40-, 40 to 1000-, 40 to 900-, 40 to 800-, 40 to 700-, 40 to 600-, 40 to 500-, 40 to 400-, 40 to 300-, 40 to 200-, 40 to 100-, 40 to 90-, 40 to 80-, 40 to 70-, 40 to 60-, 40 to 50-, 50 to 1000-, 50 to 900-, 50 to 800-, 50 to 700-, 50 to 600-, 50 to 500-, 50 to 400-, 50 to 300-, 50 to 200-, 50 to 100-, 50 to 90-, 50 to 80-, 50 to 70-, 50 to 60-, 60 to 1000-, 60 to 900-, 60 to 800-, 60 to 700-, 60 to 600-, 60 to 500-, 60 to 400-, 60 to 300-, 60 to 200-, 60 to 100-, 60 to 90-, 60 to 80-, 60 to 70-, 70 to 1000-, 70 to 900-, 70 to 800-, 70 to 700-, 70 to 600-, 70 to 500-, 70 to 400-, 70 to 300-, 70 to 200-, 70 to 100-, 70 to 90-, 70 to 80-, 80 to 1000-, 80 to 900-, 80 to 800-, 80 to 700-, 80 to 600-, 80 to 500-, 80 to 400-, 80 to 300-, 80 to 200-, 80 to 100-, 80 to 90-, 90 to 1000-, 90 to 900-, 90 to 800-, 90 to 700-, 90 to 600-, 90 to 500-, 90 to 400-, 90 to 300-, 90 to 200-, 90 to 100-, 100 to 1000-, 100 to 900-, 100 to 800-, 100 to 700-, 100 to 600-, 100 to 500-, 100 to 400-, 100 to 300-, 100 to 200-, 200 to 1000-, 200 to 900-, 200 to 800-, 200 to 700-, 200 to 600-, 200 to 500-, 200 to 400-, 200 to 300-, 300 to 1000-, 300 to 900-, 300 to 800-, 300 to 700-, 300 to 600-, 300 to 500-, 300 to 400-, 400 to 1000-, 400 to 900-, 400 to 800-, 400 to 700-, 400 to 600-, 400 to 500-, 500 to 1000-, 500 to 900-, 500 to 800-, 500 to 700-, 500 to 600-, 600 to 1000-, 600 to 900-, 600 to 800-, 600 to 700-, 700 to 1000-, 700 to 900-, 700 to 800-, 800 to 1000-, 800 to 900-, or 900 to 1000-fold reduction in the standard of care dose of a recombinant Malaria (e.g., P. falciparum, P. vivax, P. malariae and/or P. ovale), JEV, WNV, EEEV, VEEV, SINV, CHIKV, DENV, ZIKV and/or YFV protein vaccine. In some embodiments, the anti-antigenic polypeptide antibody titer produced in the subject is equivalent to an anti-antigenic polypeptide antibody titer produced in a control subject administered the standard of care dose of a recombinant or purified Malaria (e.g., P. falciparum, P. vivax, P. malariae and/or P. ovale), JEV, WNV, EEEV, VEEV, SINV, CHIKV, DENV, ZIKV and/or YFV protein vaccine or a live attenuated or inactivated Malaria (e.g., P. falciparum, P. vivax, P. malariae and/or P. ovale), JEV, WNV, EEEV, VEEV, SINV, CHIKV, DENV, ZIKV and/or YFV vaccine. In some embodiments, the effective amount is a dose equivalent to (or equivalent to an at least) 2-, 3-, 4-, 5-, 6-, 7-, 8-, 9-, 10-, 20-, 30-, 40-, 50-, 60-, 70-, 80-, 90-, 100-, 110-, 120-, 130-, 140-, 150-, 160-, 170-, 1280-, 190-, 200-, 210-, 220-, 230-, 240-, 250-, 260-, 270-, 280-, 290-, 300-, 310-, 320-, 330-, 340-, 350-, 360-, 370-, 380-, 390-, 400-, 410-, 420-, 430-, 440-, 450-, 4360-, 470-, 480-, 490-, 500-, 510-, 520-, 530-, 540-, 550-, 560-, 5760-, 580-, 590-, 600-, 610-, 620-, 630-, 640-, 650-, 660-, 670-, 680-, 690-, 700-, 710-, 720-, 730-, 740-, 750-, 760-, 770-, 780-, 790-, 800-, 810-, 820-, 830-, 840-, 850-, 860-, 870-, 880-, 890-, 900-, 910-, 920-, 930-, 940-, 950-, 960-, 970-, 980-, 990-, or 1000-fold reduction in the standard of care dose of a recombinant Malaria (e.g., P. falciparum, P. vivax, P. malariae and/or P. ovale), JEV, WNV, EEEV, VEEV, SINV, CHIKV, DENV, ZIKV and/or YFV protein vaccine. In some embodiments, an anti-antigenic polypeptide antibody titer produced in the subject is equivalent to an anti-antigenic polypeptide antibody titer produced in a control subject administered the standard of care dose of a recombinant or purified Malaria (e.g., P. falciparum, P. vivax, P. malariae and/or P. ovale), JEV, WNV, EEEV, VEEV, SINV, CHIKV, DENV, ZIKV and/or YFV protein vaccine or a live attenuated or inactivated Malaria (e.g., P. falciparum, P. vivax, P. malariae and/or P. ovale), JEV, WNV, EEEV, VEEV, SINV, CHIKV, DENV, ZIKV and/or YFV vaccine.

[1130] In some embodiments, the effective amount of a tropical disease RNA (e.g., mRNA) vaccine is a total dose of 50-1000 μg. In some embodiments, the effective amount of a tropical disease RNA (e.g., mRNA) vaccine is a total dose of 50-1000, 50-900, 50-800, 50-700, 50-600, 50-500, 50-400, 50-300, 50-200, 50-100, 50-90, 50-80, 50-70, 50-60, 60-1000, 60-900, 60-800, 60-700, 60-600, 60-500, 60-400, 60-300, 60-200, 60-100, 60-90, 60-80, 60-70, 70-1000, 70-900, 70-800, 70-700, 70-600, 70-500, 70-400, 70-300, 70-200, 70-100, 70-90, 70-80, 80-1000, 80-900, 80-800, 80-700, 80-600, 80-500, 80-400, 80-300, 80-200, 80-100, 80-90, 90-1000, 90-900, 90-800, 90-700, 90-600, 90-500, 90-400, 90-300, 90-200, 90-100, 100-1000, 100-900, 100-800, 100-700, 100-600, 100-500, 100-400, 100-300, 100-200, 200-1000, 200-900, 200-800, 200-700, 200-600, 200-500, 200-400, 200-300, 300-1000, 300-900, 300-800, 300-700, 300-600, 300-500, 300-400, 400-1000, 400-900, 400-800, 400-700, 400-600, 400-500, 500-1000, 500-900, 500-800, 500-700, 500-600, 600-1000, 600-900, 600-900, 600-700, 700-1000, 700-900, 700-800, 800-1000, 800-900, or 900-1000 μg. In some embodiments, the effective amount of a tropical disease RNA (e.g., mRNA) vaccine is a total dose of 50,100,150, 200, 250, 300, 350, 400, 450, 500, 550, 600, 650, 700, 750, 800, 850, 900, 950 or 1000 μg. In some embodiments, the effective amount is a dose of 25-500 μg administered to the subject a total of two times. In some embodiments, the effective amount of a tropical disease RNA (e.g., mRNA) vaccine is a dose of 25-500, 25-400, 25-300, 25-200, 25-100, 25-50, 50-500, 50-400, 50-300, 50-200, 50-100, 100-500, 100-400, 100-300, 100-200, 150-500, 150-400, 150-300, 150-200, 200-500, 200-400, 200-300, 250-500, 250-400, 250-300, 300-500, 300-400, 350-500, 350-400, 400-500 or 450-500 μg administered to the subject a total of two times. In some embodiments, the effective amount of a tropical disease RNA (e.g., mRNA) vaccine is a total dose of 25, 50,100,150, 200, 250, 300, 350, 400, 450, or 500 μg administered to the subject a total of two times.

### Examples of Additional Embodiments of the Disclosure

[1131] 1. A tropical disease vaccine, comprising:
   [1132] at least one messenger ribonucleic acid (mRNA) polynucleotide having a 5′ terminal cap, an open reading frame encoding at least one tropical disease antigenic polypeptide, and a 3′ polyA tail.
[1133] 2. The vaccine of paragraph 1, wherein the at least one tropical disease antigenic polypeptide is selected from a Malaria (e.g., P. falciparum, P. vivax, P. malariae and/or P. ovale) antigenic polypeptide, a JEV antigenic polypeptide, a WNV antigenic polypeptide, a EEEV antigenic polypeptide, a VEEV antigenic polypeptide, a SINV antigenic polypeptide, a CHIKV antigenic polypeptide, a DENV antigenic polypeptide, a ZIKV antigenic polypeptide and a YFV antigenic polypeptide.
[1134] 3. The vaccine of paragraph 1, wherein the at least one mRNA polynucleotide is encoded by a sequence identified by any one of SEQ ID NO: 1-6, 18, 19, 30-34, 48, 49, 55, 56, 65-80, 118-136, 223-239 or 376-388, or a fragment of a sequence identified by any one of SEQ ID NO: 1-6, 18, 19, 30-34, 48, 49, 55, 56, 65-80, 118-136, 223-239 or 376-388.
[1135] 4. The vaccine of paragraph 1, wherein the at least one mRNA polynucleotide comprises a sequence identified by any one of SEQ ID NO: 7-12, 20-21, 35-39, 50-51, 57-58, 81-96, 137-155, 240-256, or 389-401, or a fragment of a sequence identified by any one of SEQ ID NO: 7-12, 20-21, 35-39, 50-51, 57-58, 81-96, 137-155, 240-256, or 389-401.
[1136] 5. The vaccine of paragraph 1, wherein the at least one antigenic polypeptide comprises a sequence identified by any one of SEQ ID NO: 13-17, 22-29, 44-47, 52-54, 59-64, 97-117, 156-222, 469, 259-291 or 402-413, or a fragment of a sequence identified by any one of SEQ ID NO: 13-17, 22-29, 44-47, 52-54, 59-64, 97-117, 156-222, 469, 259-291 or 402-413.
[1137] 6. The vaccine of any one of paragraphs 1-5, wherein the 5′ terminal cap is or comprises 7 mG (5′)ppp(5′) NlmpNp.
[1138] 7. The vaccine of any one of paragraphs 1-6, wherein 100% of the uracil in the open reading frame is modified to include N1-methyl pseudouridine at the 5-position of the uracil.
[1139] 8. The vaccine of any one of paragraphs 1-7, wherein the vaccine is formulated in a lipid nanoparticle comprising: DLin-MC3-DMA; cholesterol; 1,2-Distearoyl-sn-glycero-3-phosphocholine (DSPC); and polyethylene glycol (PEG) 2000-DMG.
[1140] 9. The vaccine of paragraph 8, wherein the lipid nanoparticle further comprises trisodium citrate buffer, sucrose and water.

[1141] This disclosure is not limited in its application to the details of construction and the arrangement of components set forth in the following description or illustrated in the drawings. The disclosure is capable of other embodiments and of being practiced or of being carried out in various ways. Also, the phraseology and terminology used herein is for the purpose of description and should not be regarded as limiting. The use of “including,” “comprising,” or “having,” “containing,” “involving,” and variations thereof herein, is meant to encompass the items listed thereafter and equivalents thereof as well as additional items.

### EXAMPLES

### Example 1: Manufacture of Polynucleotides

[1142] According to the present disclosure, the manufacture of polynucleotides and/or parts or regions thereof may be accomplished utilizing the methods taught in International Publication WO2014/152027, entitled “Manufacturing Methods for Production of RNA Transcripts,” the contents of which is incorporated herein by reference in its entirety.

[1143] Purification methods may include those taught in International Publication WO2014/152030 and International Publication WO2014/152031, each of which is incorporated herein by reference in its entirety.

[1144] Detection and characterization methods of the polynucleotides may be performed as taught in International Publication WO2014/144039, which is incorporated herein by reference in its entirety.

[1145] Characterization of the polynucleotides of the disclosure may be accomplished using polynucleotide mapping, reverse transcriptase sequencing, charge distribution analysis, detection of RNA impurities, or any combination of two or more of the foregoing. “Characterizing” comprises determining the RNA transcript sequence, determining the purity of the RNA transcript, or determining the charge heterogeneity of the RNA transcript, for example. Such methods are taught in, for example, International Publication WO2014/144711 and International Publication WO2014/144767, the content of each of which is incorporated herein by reference in its entirety.

### Example 2: Chimeric Polynucleotide Synthesis

[1146] According to the present disclosure, two regions or parts of a chimeric polynucleotide may be joined or ligated using triphosphate chemistry. A first region or part of 100 nucleotides or less is chemically synthesized with a 5′ monophosphate and terminal 3′desOH or blocked OH, for example. If the region is longer than 80 nucleotides, it may be synthesized as two strands for ligation.

[1147] If the first region or part is synthesized as a non-positionally modified region or part using in vitro transcription (IVT), conversion the 5′monophosphate with subsequent capping of the 3′ terminus may follow.

[1148] Monophosphate protecting groups may be selected from any of those known in the art.

[1149] The second region or part of the chimeric polynucleotide may be synthesized using either chemical synthesis or IVT methods. IVT methods may include an RNA polymerase that can utilize a primer with a modified cap. Alternatively, a cap of up to 130 nucleotides may be chemically synthesized and coupled to the IVT region or part.

[1150] For ligation methods, ligation with DNA T4 ligase, followed by treatment with DNase should readily avoid concatenation.

[1151] The entire chimeric polynucleotide need not be manufactured with a phosphate-sugar backbone. If one of the regions or parts encodes a polypeptide, then such region or part may comprise a phosphate-sugar backbone.

[1152] Ligation is then performed using any known click chemistry, orthoclick chemistry, solulink, or other bioconjugate chemistries known to those in the art.

### Synthetic Route

[1153] The chimeric polynucleotide may be made using a series of starting segments. Such segments include:
[1154] (a) a capped and protected 5′ segment comprising a normal 3′OH (SEG. 1)
[1155] (b) a 5′ triphosphate segment, which may include the coding region of a polypeptide and a normal 3′OH (SEG. 2)
[1156] (c) a 5′ monophosphate segment for the 3′ end of the chimeric polynucleotide (e.g., the tail) comprising cordycepin or no 3′OH (SEG. 3)

[1157] After synthesis (chemical or IVT), segment 3 (SEG. 3) may be treated with cordycepin and then with pyrophosphatase to create the 5′ monophosphate.

[1158] Segment 2 (SEG. 2) may then be ligated to SEG. 3 using RNA ligase. The ligated polynucleotide is then purified and treated with pyrophosphatase to cleave the diphosphate. The treated SEG.2-SEG. 3 construct may then be purified and SEG. 1 is ligated to the 5′ terminus. A further purification step of the chimeric polynucleotide may be performed.

[1159] Where the chimeric polynucleotide encodes a polypeptide, the ligated or joined segments may be represented as: 5′UTR (SEG. 1), open reading frame or ORF (SEG. 2) and 3′UTR+PolyA (SEG. 3).

[1160] The yields of each step may be as much as 90-95%.

### Example 3: PCR for cDNA Production

[1161] PCR procedures for the preparation of cDNA may be performed using 2×KAPA HIFI™ HotStart ReadyMix by Kapa Biosystems (Woburn, MA). This system includes 2× KAPA ReadyMix 12.5 μl; Forward Primer (10 μM) 0.75 μl; Reverse Primer (10 μM) 0.75 μl; Template cDNA 100 ng; and dH₂O diluted to 25.0 μl. The reaction conditions may be at 95° C. for 5 min. The reaction may be performed for 25 cycles of 98° C. for 20 sec, then 58° C. for 15 sec, then 72° C. for 45 sec, then 72° C. for 5 min, then 4° C. to termination.

[1162] The reaction may be cleaned up using Invitrogen's PURELINK™ PCR Micro Kit (Carlsbad, CA) per manufacturer's instructions (up to 5 μg). Larger reactions may require a cleanup using a product with a larger capacity. Following the cleanup, the cDNA may be quantified using the NANODROP™ and analyzed by agarose gel electrophoresis to confirm that the cDNA is the expected size. The cDNA may then be submitted for sequencing analysis before proceeding to the in vitro transcription reaction.

### Example 4: In Vitro Transcription (IVT)

[1163] The in vitro transcription reaction generates RNA polynucleotides. Such polynucleotides may comprise a region or part of the polynucleotides of the disclosure, including chemically modified RNA (e.g., mRNA) polynucleotides. The chemically modified RNA polynucleotides can be uniformly modified polynucleotides. The in vitro transcription reaction utilizes a custom mix of nucleotide triphosphates (NTPs). The NTPs may comprise chemically modified NTPs, or a mix of natural and chemically modified NTPs, or natural NTPs.

[1164] A typical in vitro transcription reaction includes the following:

| | | | |
|---|---|---|---|
| 1) | Template cDNA | 1.0 | μg |
| 2) | 10x transcription buffer | 2.0 | μl |
| | (400 mM Tris-HCl pH 8.0, 190 mM | | |
| | MgCl₂, 50 mM DTT, 10 mM Spermidine) | | |
| 3) | Custom NTPs (25 mM each) | 0.2 | μl |
| 4) | RNase Inhibitor | 20 | U |
| 5) | T7 RNA polymerase | 3000 | U |

| | | |
|---|---|---|
| 6) | dH₂0 | up to 20.0 μl. and |
| 7) | Incubation at 37° C. for 3 hr-5 hrs. | |

[1165] The crude IVT mix may be stored at 4° C. overnight for cleanup the next day. 1 U of RNase-free DNase may then be used to digest the original template. After 15 minutes of incubation at 37° C., the mRNA may be purified using Ambion's MEGACLEAR™ Kit (Austin, TX) following the manufacturer's instructions. This kit can purify up to 500 μg of RNA. Following the cleanup, the RNA polynucleotide may be quantified using the NANODROP™ and analyzed by agarose gel electrophoresis to confirm the RNA polynucleotide is the proper size and that no degradation of the RNA has occurred.

### Example 5: Enzymatic Capping

[1166] Capping of a RNA polynucleotide is performed as follows where the mixture includes: IVT RNA 60 μg-180 μg and dH₂O up to 72 μl. The mixture is incubated at 65° C. for 5 minutes to denature RNA, and then is transferred immediately to ice.

[1167] The protocol then involves the mixing of 10× Capping Buffer (0.5 M Tris-HCl (pH 8.0), 60 mM KCl, 12.5 mM MgCl₂) (10.0 μl); 20 mM GTP (5.0 μl); 20 mM S-Adenosyl Methionine (2.5 μl); RNase Inhibitor (100 U); 2′-O-Methyltransferase (400U); Vaccinia capping enzyme (Guanylyl transferase) (40 U); dH₂O (Up to 28 μl); and incubation at 37° C. for 30 minutes for 60 μg RNA or up to 2 hours for 180 μg of RNA.

[1168] The RNA polynucleotide may then be purified using Ambion's MEGACLEAR™ Kit (Austin, TX) following the manufacturer's instructions. Following the cleanup, the RNA may be quantified using the NANODROP™ (ThermoFisher, Waltham, MA) and analyzed by agarose gel electrophoresis to confirm the RNA polynucleotide is the proper size and that no degradation of the RNA has occurred. The RNA polynucleotide product may also be sequenced by running a reverse-transcription-PCR to generate the cDNA for sequencing.

### Example 6: PolyA Tailing Reaction

[1169] Without a poly-T in the cDNA, a poly-A tailing reaction must be performed before cleaning the final product. This is done by mixing capped IVT RNA (100 μl); RNase Inhibitor (20 U); 10× Tailing Buffer (0.5 M Tris-HCl (pH 8.0), 2.5 M NaCl, 100 mM MgCl₂) (12.0 μl); 20 mM ATP (6.0 μl); Poly-A Polymerase (20 U); dH₂O up to 123.5 μl and incubation at 37° C. for 30 min. If the poly-A tail is already in the transcript, then the tailing reaction may be skipped and proceed directly to cleanup with Ambion's MEGACLEAR™ kit (Austin, TX) (up to 500 μg). Poly-A Polymerase may be a recombinant enzyme expressed in yeast.

[1170] It should be understood that the processivity or integrity of the polyA tailing reaction may not always result in an exact size polyA tail. Hence, polyA tails of approximately between 40-200 nucleotides, e.g., about 40, 50, 60, 70, 80, 90, 91, 92, 93, 94, 95, 96, 97, 98, 99,100,101, 102, 103, 104, 105, 106, 107, 108, 109, 110, 150-165, 155, 156, 157, 158, 159, 160, 161, 162, 163, 164 or 165 are within the scope of the present disclosure.

### Example 7: Natural 5′ Caps and 5′ Cap Analogues

[1171] 5′-capping of polynucleotides may be completed concomitantly during the in vitro-transcription reaction using the following chemical RNA cap analogs to generate the 5′-guanosine cap structure according to manufacturer protocols: 3′-O-Me-m7G(5′)ppp(5′)G [the ARCA cap]; G(5′)ppp(5′)A; G(5′)ppp(5′)G; m7G(5′)ppp(5′)A; m7G(5′)ppp(5′)G (New England BioLabs, Ipswich, MA). 5′-capping of modified RNA may be completed post-transcriptionally using a Vaccinia Virus Capping Enzyme to generate the “Cap 0” structure: m7G (5′)ppp(5′) G (New England BioLabs, Ipswich, MA). Cap 1 structure may be generated using both Vaccinia Virus Capping Enzyme and a 2′-O methyl-transferase to generate: m7G (5′)ppp(5′) G-2′-O-methyl. Cap 2 structure may be generated from the Cap 1 structure followed by the 2′-O-methylation of the 5′-antepenultimate nucleotide using a 2′-O methyl-transferase. Cap 3 structure may be generated from the Cap 2 structure followed by the 2′-O-methylation of the 5′-preantepenultimate nucleotide using a 2′-O methyl-transferase. Enzymes are preferably derived from a recombinant source.

[1172] When transfected into mammalian cells, the modified mRNAs have a stability of between 12-18 hours or more than 18 hours, e.g., 24, 36, 48, 60, 72 or greater than 72 hours.

### Example 8: Capping Assays

### Protein Expression Assay

[1173] Polynucleotides (e.g., mRNA) encoding a polypeptide, containing any of the caps taught herein, can be transfected into cells at equal concentrations. The amount of protein secreted into the culture medium can be assayed by ELISA at 6, 12, 24 and/or 36 hours post-transfection. Synthetic polynucleotides that secrete higher levels of protein into the medium correspond to a synthetic polynucleotide with a higher translationally-competent cap structure.

### Purity Analysis Synthesis

[1174] RNA (e.g., mRNA) polynucleotides encoding a polypeptide, containing any of the caps taught herein can be compared for purity using denaturing Agarose-Urea gel electrophoresis or HPLC analysis. RNA polynucleotides with a single, consolidated band by electrophoresis correspond to the higher purity product compared to polynucleotides with multiple bands or streaking bands. Chemically modified RNA polynucleotides with a single HPLC peak also correspond to a higher purity product. The capping reaction with a higher efficiency provides a more pure polynucleotide population.

### Cytokine Analysis

[1175] RNA (e.g., mRNA) polynucleotides encoding a polypeptide, containing any of the caps taught herein can be transfected into cells at multiple concentrations. The amount of pro-inflammatory cytokines, such as TNF-alpha and IFN-beta, secreted into the culture medium can be assayed by ELISA at 6, 12, 24 and/or 36 hours post-transfection. RNA polynucleotides resulting in the secretion of higher levels of pro-inflammatory cytokines into the medium correspond to a polynucleotides containing an immune-activating cap structure.

### Capping Reaction Efficiency

[1176] RNA (e.g., mRNA) polynucleotides encoding a polypeptide, containing any of the caps taught herein can be analyzed for capping reaction efficiency by LC-MS after nuclease treatment. Nuclease treatment of capped polynucleotides yield a mixture of free nucleotides and the capped 5′-5-triphosphate cap structure detectable by LC-MS. The amount of capped product on the LC-MS spectra can be expressed as a percent of total polynucleotide from the reaction and correspond to capping reaction efficiency. The cap structure with a higher capping reaction efficiency has a higher amount of capped product by LC-MS.

### Example 9: Agarose Gel Electrophoresis of Modified RNA or RT PCR Products

[1177] Individual RNA polynucleotides (200-400 ng in a 20 μl volume) or reverse transcribed PCR products (200-400 ng) may be loaded into a well on a non-denaturing 1.2% Agarose E-Gel (Invitrogen, Carlsbad, CA) and run for 12-15 minutes, according to the manufacturer protocol.

### Example 10: NANODROP™ Modified RNA Quantification and UV Spectral Data

[1178] Chemically modified RNA polynucleotides in TE buffer (1 μl) are used for NANODROP™ UV absorbance readings to quantitate the yield of each polynucleotide from an chemical synthesis or in vitro transcription reaction.

### Example 11: Formulation of Modified mRNA Using Lipidoids

[1179] RNA (e.g., mRNA) polynucleotides may be formulated for in vitro experiments by mixing the polynucleotides with the lipidoid at a set ratio prior to addition to cells. In vivo formulation may require the addition of extra ingredients to facilitate circulation throughout the body. To test the ability of these lipidoids to form particles suitable for in vivo work, a standard formulation process used for siRNA-lipidoid formulations may be used as a starting point. After formation of the particle, polynucleotide is added and allowed to integrate with the complex. The encapsulation efficiency is determined using a standard dye exclusion assays.

### Example 12: Immunogenicity Study

[1180] The instant study is designed to test the immunogenicity in mice of candidate Malaria vaccines comprising a mRNA polynucleotide encoding CS protein, LSA1, MSP1, AMA1, TRAP or a combination thereof obtained from Plasmodium.

[1181] Mice are immunized intramuscularly (IM), or intradermally (ID) with mRNA encoding CS protein, LSA1, MSP1, TRAP and AMA1. Up to three immunizations are given at 3-week intervals (i.e., at weeks 0, 3, and 6), and sera are collected after each immunization until weeks 33-51. Serum antibody titers against CS protein, LSA1, MSP1 and AMA1 are determined by ELISA. Responses against Plasmodium sporozoites, asexual blood-stage parasites, and gametocytes were determined by using an indirect immunofluorescence assay (IFA). T cell responses were analyzed by Elispot using splenocytes from immunized mice and stimulated with peptide pools from the relevant antigens.

### Example 13: Plasmodium Non-Human Primate Challenge

[1182] The instant study is designed to test the efficacy in simians of candidate Malaria vaccines against a lethal challenge using a Malaria vaccine comprising mRNA encoding CS protein, LSA1, MSP1, AMA1, TRAP or a combination thereof obtained from Plasmodium. Simians are challenged with a lethal dose of Plasmodium.

[1183] Simians are immunized intramuscularly (IM) or intradermally (ID) at week 0, week 3 and week 6 with candidate Malaria vaccines.

[1184] Serum antibody titers against CS protein, LSA1, MSP1 and AMA1 are determined by ELISA. Responses against Plasmodium sporozoites, asexual blood-stage parasites, and gametocytes were determined by using an indirect immunofluorescence assay (IFA). T cell responses were analyzed by Elispot using PBMCs from immunized primates and stimulated with peptide pools from the relevant antigens.

[1185] In experiments where a lipid nanoparticle (LNP) formulation is used, the formulation may include a cationic lipid, non-cationic lipid, PEG lipid and structural lipid in the ratios 50:10:1.5:38.5. The cationic lipid may be DLin-KC2-DMA (50 mol %), the non-cationic lipid may be DSPC (10 mol %), the PEG lipid may be PEG-DOMG (1.5 mol %) and the structural lipid may be cholesterol (38.5 mol %), for example.

### Example 14: Plasmodium Human Challenge

[1186] The instant study is designed to test the efficacy in human subjects of candidate Malaria vaccines against an attenuated challenge (Controlled Human Malaria Infection (CHMI) Study) using a Malaria vaccine comprising mRNA encoding CS protein, LSA1, MSP1, AMA1, TRAP or a combination thereof obtained from Plasmodium. Subjects are challenged with an attenuated (non-lethal) dose of Plasmodium.

[1187] Subjects are immunized intramuscularly (IM) or intradermally (ID) at week 0 and week 3 with candidate Malaria vaccines. Serum is tested for microneutralization (see Example 16). The subjects are then challenged with an attenuated dose of Plasmodium on week 7 via IV, IM or ID. Endpoint is day 13 post infection. Body temperature and weight are assessed and recorded daily.

[1188] In experiments where a lipid nanoparticle (LNP) formulation is used, the formulation may include a cationic lipid, non-cationic lipid, PEG lipid and structural lipid in the ratios 50:10:1.5:38.5. The cationic lipid may be DLin-KC2-DMA (50 mol %), the non-cationic lipid may be DSPC (10 mol %), the PEG lipid may be PEG-DOMG (1.5 mol %) and the structural lipid may be cholesterol (38.5 mol %), for example.

### Example 15: Microneutralization Assay

[1189] Nine serial 2-fold dilutions (1:50-1:12,800) of simian or human serum are made in 50 μl virus growth medium (VGM) with trypsin in 96 well microtiter plates. Fifty microliters of Plasmodium are added to the serum dilutions and allowed to incubate for 60 minutes at room temperature (RT). Positive control wells of Plasmodium without sera and negative control wells without Plasmodium or sera are included in triplicate on each plate. While the serum-Plasmodium mixtures incubate, a single cell suspension of cells is prepared by trypsinizing (Gibco 0.5% bovine pancrease trypsin in EDTA) a confluent monolayer, and suspended cells are transferred to a 50 ml centrifuge tube, topped with sterile PBS and gently mixed. The cells are then pelleted at 200 g for 5 minutes, supernatant aspirated and cells resuspended in PBS. This procedure is repeated once and the cells are resuspended at a concentration of 3×10⁵/ml in VGM with porcine trypsin. Then, 100 μl of cells are added to the serum-virus mixtures and the plates incubated at 35° C. in CO₂ for 5 days. The plates are fixed with 80% acetone in phosphate buffered saline (PBS) for 15 minutes at RT, air dried and then blocked for 30 minutes containing PBS with 0.5% gelatin and 2% FCS. An antibody to CS protein, LSA1, MSP1, AMA1 or TRAP is diluted in PBS with 0.5% gelatin/2% FCS/0.5% Tween 20 and incubated at RT for 2 hours. Wells are washed and horse radish peroxidase conjugated goat anti-mouse IgG added, followed by another 2 hour incubation. After washing, O-phenylenediamine dihydrochloride is added and the neutralization titer is defined as the titer of serum that reduced color development by 50% compared to the positive control wells.

### Example 16: JEV Immunogenicity Study

[1190] This study was designed to test the immunogenicity of JEV prME mRNA vaccines in Balb/c mice. Mice were 6-8 weeks old.

[1191] Mice were immunized intramuscularly at three different doses (10 μg, 2 μg and 0.5 μg). All mice were given two doses of the vaccine, one at day 0 and another at day 28. Serum was collected at days 0 and 56, and a plaque reduction neutralization test was used to quantify neutralizing antibody titer. The concentration of serum to reduce the number of plaques in the assay by 50%, compared to the serum free virus, denoted as PRNT50 was used as a measure of neutralizing antibodies and level of protection against virus.

[1192] Results of this study is shown in FIG. 1. A PRNT50 titer of greater than 1:10 is considered protective. JEV mRNA vaccine at 10 μg doses results in a very high titer, indicative of a high potency vaccine.

### Example 17: Immunogenicity Cross-Neutralization Study

[1193] The instant study is designed to test the immunogenicity and cross-neutralization in mice of candidate combination vaccines comprising a mRNA polynucleotide encoding antigenic polypeptides (e.g., envelope proteins) obtained from Plasmodium, JEV, WNV, EEEV, VEEV, SINV, CHIKV, DENV, ZIKV and/or YFV.

[1194] Mice are immunized intravenously (IV), intramuscularly (IM), or intradermally (ID) with candidate combination vaccines. A total of four immunizations are given at 3-week intervals (at weeks 0, 3, 6, and 9), and sera are collected after each immunization until weeks 33-51. Serum antibody titers against envelope proteins are determined by ELISA. Sera collected from each mouse during weeks 10-16 are pooled, and total IgGs are purified by using ammonium sulfate (Sigma) precipitation followed by DEAE (Pierce) batch purification. Following dialysis against PBS, the purified antibodies are used for immunoelectron microscopy, antibody-affinity testing, and an in vitro protection assay.

### Example 18: Immunogenicity Studies for Combination RNA Vaccine

[1195] BALB/C mice are immunized with mRNA encoded Plasmodium, JEV, WNV, EEEV, VEEV, SINV, CHIKV, DENV, ZIKV and/or YFV antigenic polypeptides, for example, as shown in Table 7 below and according to the following dosing/bleeding schedule: prime dose on day 0, boost dose on day 28, bleeding on days 0, 28, 42 and 56.

[1196] The mice are administered a combination vaccine, combining two or more of the Plasmodium, JEV, WNV, EEEV, VEEV, SINV, CHIKV, DENV, ZIKV and/or YFV antigenic polypeptides, such that all possible combinations are tested. Animals are challenged at day 56 with a second dose of any one of the antigenic polypeptides included in the original dose.

[1197] An efficacy study using mRNA encoded West Nile prMEs and Japanese Encephalitis prMEs antigens is also performed according to the following schedule:

[1198] Non-human primates are also immunized with mRNA encoded antigen using similar schedules shown in Tables 7 and 8. The animals are tested for immunogenicity to Plasmodium, JEV, WNV, EEEV, VEEV, SINV, CHIKV, DENV, ZIKV and/or YFV and combinations thereof.

### Example 19. YFV Immunogenicity Studies

[1199] The instant study is designed to test the immunogenicity in Balb/c mice of candidate yellow fever virus (YFV) vaccines comprising a mRNA polynucleotide encoding YFV prME. Four groups of Balb/c mice (n=5) are immunized intramuscularly (IM) with 10 μg (n=2) or 2 μg (n=2) of the candidate vaccine. One group of mice is administered PBS intramuscularly as a control. All mice are administered an initial dose of vaccine (Groups 1-4) or PBS (Group 5) on Day 0, and then the mice in Groups 1 and 3 are administered a boost dose on Day 21, while the mice in Group 5 are administered PBS on Day 21. All mice are bled on Day 41. See Table 1. Anti-Yellow fever neutralization IgG titer is determined on Day-1, Day 28 and Day 41.

### Example 20. YFV Rodent Challenge

[1200] The instant study is designed to test the efficacy in AG129 mice of candidate yellow fever virus (YFV) vaccines against a lethal challenge using a YFV vaccine comprising mRNA encoding YFV prME. Four groups of AG129 mice (n=8) are immunized intramuscularly (IM) with 10 μg (n=2) or 2 μg (n=2) of the candidate vaccine. One group of mice is administered PBS intramuscularly as a control. All mice are administered an initial dose of vaccine (Groups 1-4) or PBS (Group 5) on Day 0, and then the mice in Groups 1 and 3 are administered a boost dose on Day 21, while the mice in Group 5 are administered PBS on Day 21. All mice are challenged with a lethal dose of YFV in Day 42. All mice are then monitored for survival and weight loss. Anti-Yellow fever neutralization IgG titer is determined on Day-1, Day 28 and Day 41, and viral load is determined 5 days post challenge.

### Example 21. Expression of ZIKV prME Protein in Mammalian Cells Using ZIKV mRNA Vaccine Construct

[1201] The Zika virus (ZIKV) prME mRNA vaccine construct were tested in mammalian cells (239T cells) for the expression of ZIKV prME protein. 293T cells were plated in 24-well plates and were transfected with 2 μg of ZIKV prME mRNA using a Lipofectamine transfection reagent. The cells were incubated for the expression of the ZIKV prME proteins before they were lysed in an immunoprecipitation buffer containing protease inhibitor cocktails. Reducing agent was not added to the lysis buffer to ensure that the cellular proteins were in a non-reduced state. Cell lysates were centrifuged at 8,000×g for 20 mins to collect lysed cell precipitate. The cell precipitates were then stained with anti ZIKV human serum and goat anti-human Alexa Fluor 647. Fluorescence was detected as an indication of prME expression.

[1202] The expression of ZIKV prME protein was also detected by fluorescence-activated cell sorting (FACS) using a flow cytometer. 293F cells (2×10⁶ cells/ml, 30 ml) were transfected with 120 μg PEI, 1 ml of 150 mM NaCl, and 60 μg prME mRNA. Transfected cells were incubated for 48 hours at 37° C. in a shaker at 130 rpm and under 5% CO₂. The cells were then washed with PBS buffer containing 2% FBS and fixed in a fixation buffer (PBS buffer containing formalin) for 20 minutes at room temperature. The fixed cells were permeabilized in a permeabilization buffer (PBS+1% Triton X100+1 μl of Golgi plug/ml of cells). The permeabilized cells were then stained with anti-ZIKV human serum (1:20 dilution) and goat anti-human Alexa Fluor 647 secondary antibody, before they were sorted on a flow cytometer. As shown in FIG. 2, FIG. 3A and FIG. 3B, cells transfected with prME mRNA and stained with the anti-ZIKA human serum shifted to higher fluorescent intensity, indicating that prME expressed from the ZIKV mRNA vaccine constructs in the transfected cells.

### Example 22. Expression, Purification and Characterization of ZIKV VLPs

[1203] Zika virus (ZIKV) virus-like particles (VLPs) were made in Hela cells and in HEK293T cells and purified via PEG precipitation or ultracentrifugation, respectively. Cells were cultured in culture media. Prior to transfection, cells were passaged twice in virus growth media plus 10% fetal bovine serum (FBS) to media adaptation.

[1204] Cells were seeded the day before transfection into T-175 flask. 100 μg of prME-encoding mRNA was transfected using 100 μg pf lipofectamine as per manufacturer's protocol. 6 hours post transfection, monolayers were washed twice with 1×PBS and 20 mL of virus growth media was added. Supernatant was collected 24-48 hours post transfection by centrifugation at 2000×g for 10 mins and 0.22 um filtration.

[1205] For VLP purification via PEG precipitation, VLP's were concentrated using Biovision PEG precipitation kit as per manufacturer's protocol. In brief, supernatant with VLP's was mixed with PEG8000 and incubated at 4° C. for 16 hours. After incubation, mixture was centrifuged at 3000×g for 30 mins. Pellet containing concentrated VLP's was collected and suspended into PBS. VLP's were further buffer exchanged into PBS (1:500) using amicon ultra 100 MWCO filter. Purified samples were negative stained to show the presence of assembled VLP particles.

[1206] Expression of prME from the vaccine mRNA constructs was demonstrated to result in the production of virus like particles (VLPs) that are expected to present to the immune system as identical to Zika virus particles. Negative stain electron micrographs of supernatants from HeLa cells transfected with mRNA encoding Zika prME showed that the virus-like particles (VLPs), purified by PEG precipitation, have highly uniform size (˜35-40 nm) and morphology. The bumpy appearance of the VLP surface appears to reflect mostly immature morphology due to expression from HeLa cells, which have very low expression of furin, a host protease that is required for maturation the viral envelope. Upon maturation, these VLPs will have an exterior structure essentially identical to wild type viral particles, thus eliciting a broad immune response to future Zika virus exposure.

[1207] For VLP purification via ultracentrifugation, 293T cells were transfected with Zika prME mRNA as described herein. Supernatant was collected 24 hours after changing the media as described herein (30 hours post transfection). VLPs were concentrated using Biovision PEG virus precipitation kit into 500 μL volume. VLPs were further purified using a 10-50% sucrose gradient. Sample layer was seen between 20-30% sucrose layers and collected. VLPs were buffered exchanged into PBS by 1:1000 dilution using a 100MWCO amicon ultra filter. VLPs were concentrated after PEG precipitation, and ultracentrifuge-purified VLPs were analyzed for purity on a reducing SDS-PAGE gel (FIG. 4).

### Example 23: ZIKV mRNA Vaccine Immunogenicity Studies

[1208] The instant study was designed to test the immunogenicity in Balb/c mice of candidate ZIKV vaccines comprising a mRNA polynucleotide encoding ZIKV prME. Four groups of Balb/c mice (n=5) were immunized intramuscularly (IM) with 10 μg (n=2) or 2 μg (n=2) of the candidate vaccine. One group of mice was administered PBS intramuscularly as a control. All mice were administered an initial dose of vaccine (Groups 1-4) or PBS (Group 5) on Day 0, and then the mice in Groups 1 and 3 were administered a boost dose on Day 21, while the mice in Group 5 were administered PBS on Day 21. All mice were bled on Day 41. See Table 29. Anti-Zika neutralization IgG titer was determined on Day −1, Day 28 and Day 41 (FIG. 5).

[1209] Day 42 neutralizing titers reached EC50s of 427 for 2 μg and 690 for 10 μg. The control serum in this experiment was from naturally infected immunocompromised mice (Ifnar1−/−, derived from B/6 lineage) in which high viral loads would be achieved.

### Example 24: ZIKV Rodent Challenge

[1210] The instant study was designed to test the efficacy in AG129 mice of candidate ZIKV vaccines against a lethal challenge using a ZIKV vaccine comprising mRNA encoding ZIKV prME. Four groups of AG129 mice (n=8) were immunized intramuscularly (IM) with 10 μg (n=2) or 2 μg (n=2) of the candidate vaccine. One group of mice was administered PBS intramuscularly as a control. All mice were administered an initial dose of vaccine (Groups 1-4) or PBS (Group 5) on Day 0, and then the mice in Groups 1 and 3 were administered a boost dose on Day 21, while the mice in Group 5 were administered PBS on Day 21. All mice were challenged with a lethal dose of ZIKV in Day 42. All mice were then monitored for survival and weight loss. Anti-Zika neutralization IgG titer was determined on Day-1, Day 28 and Day 41, and viral load was determined 5 days post challenge. The 10 μg dose provided 100% protection, even with a single dose, and the 2 μg dose provided 60% protection with a single dose and 90% protection with prime-boost doses (see FIGS. 7A and 7B).

[1211] In experiments where a lipid nanoparticle (LNP) formulation is used, the formulation may include a cationic lipid, non-cationic lipid, PEG lipid and structural lipid in the ratios 50:10:1.5:38.5. The cationic lipid may be DLin-KC2-DMA or DLin-MC3-DMA (50 mol %), the non-cationic lipid may be DSPC (10 mol %), the PEG lipid is PEG-DOMG or PEG-DMG (1.5 mol %) and the structural lipid may be cholesterol (38.5 mol %), for example.

### Example 25: Exemplary Dengue Sequences

[1212] An exemplary Dengue virus (DENV) peptide epitope may include two or more epitopes. The epitopes can be of the same sequence or different sequence and can be all T-cell epitopes, all B-cell epitopes or a combination of both. Furthermore, various end units for enhancing MHC processing of the peptides are possible.

[1213] The following sequences represent exemplary DENV peptide epitopes identified using a database screen (the sequences correspond to SEQ ID NO: 357-360):

| | | | |
|---|---|---|---|
| DenV1 | 1 | MRCVGIGNRDFVEGLSGATNVDVVLEHGSCVTTMAKDKPTLDIELLKTEVTNPAVLRKLCIEAKISNTTTDSRCPTQGEA | 80 |
| DenV2 | 1 | MRCIGISNRDFVEGVSGGSNVDIVLEHGSCVTTMAKNKPTLDFELIKTEAKQPATLRKYCIEAKLTNTTTESRCPTQGEP | 80 |
| DenV3 | 1 | MRCVGVGNRDFVEGLSGATWVDVVLEHGGCVTTMAKNKPTLDIELQKTEATQLATLRKLCIEGKITNITTDSRCPTQGEA | 80 |
| DenV4 | 1 | MRCVGVGNRDFVEGVSGGAWVDLVLEHGGCVTTMAQGKPTLDFELTKTTAKEVALLRTYCIEASISNITTATRCPTQGEP | 80 |
| DenV1 | 81 | TLVEEQDANFVCRRTFVCRGAGNGCGLFGKGSLLTCAKFKCVTKLEGKIVQYENLKYSVIVTVHTGDQHQVGNETTEHGT | 160 |
| DenV2 | 81 | TLNEEQDKRFVCKHSMVDRGWGNGCGLFGKGGIVTCAMFTCKKNMEGKIVQPENLEYTVVITPHSGEEHAVGNDTGKHGK | 160 |
| DenV3 | 81 | ILPEEQDQNYVCKHTYVDRGWGNGCGLFGKGSLVTCAKFQCLESIEGKIVQHENLKYTVIITVHTGDQHQVGNET--QGV | 158 |
| DenV4 | 81 | YLKEEQDQQYICRRDVVDRGWGNGCGLFGKGGVVTCAKFSCSGKITGNLVQIENLEYTVVVTVHNGDTHAVGNDTSNHGV | 160 |
| DenV1 | 161 | IATITPQAPTSEIQLTDYGALTLDCSPRTGLDFNFMVLLTMKEKSWLVHKQWFLDLPLPWTSGASTSQETWNRQDLLVTF | 240 |
| DenV2 | 161 | EVKITPQSSITEAELTGYGTVTMECSPRTGLDFNFMVLLQMKDKAWLVHRQWFLDLPLPWLPGADTQGSNWIQKETLVTF | 240 |
| DenV3 | 159 | TAEITSQASTAEAILPEYGTLGLECSPRTGLDFNEMILLTMKDKAWMVHRQWFFDLPLPWTSGATTKTPTWNRKELLVTF | 238 |
| DenV4 | 161 | TAMITPRSPSVEVKLPDYGELTLDCEPRSGIDFNEMILMKMKKKTWLVHKQWFLDLPLPWTAGADTSEVHWNYKERMVTF | 240 |
| DenV1 | 241 | KTAHAKKQEAVVLGSQEGAMHTALTGATEIQTSGTTTIFAGHLKCRLKMDKLTLKGISYVMCTGSFKLEKEVAETQHGTV | 320 |
| DenV2 | 241 | KNPHAKKQDVVVLGSQEGAMHTALTGATEIQMSSGNLLFTGHLKCALRMDKLQLKGMSYSMCTGKFKVVKEIAETQHGTI | 320 |
| DenV3 | 239 | KNAHAKKQEVVVLGSQEGAMHTALTGATEIQTSGGTSIFAGHLKCRLKMDKLKLKGMSYAMCLNTFVLKKEVSETQHGTI | 318 |
| DenV4 | 241 | KVPHAKRQDVTVLGSQEGAMHSALAGATEVDSGDGNHMFAGHLKCKVRMEKLRIKGMSYTMCSGKFSIDKEMAETQHGTT | 320 |
| DenV1 | 321 | LVQVKYEGTDAPCKIPFSSQDEKGVTQNGRLVTANPIVTDKEKPVNIEAEPPFGESYIVVGAGEKALKLSWFKKGSSIGK | 400 |
| DenV2 | 321 | VIRVQYEGDGSPCKIPFEIMDLEKRHVLGRLITVNPIVTEKDSPVNIEAEPPFGDSYIIIGVEPDQLKLNWFKK------ | 394 |
| DenV3 | 319 | LIKVEYKGEDAPCKIPFSTEDGQGKAHNGRLITANPVVTKKEEPVNIEAEPPFGESNIVIGIGDKALKINWYRK------ | 392 |
| DenV4 | 321 | VVKVKYEGAGAPCKVPIEIRDVNKEKVVGRIISSTPLAENTNSVTNIELEPPFGDSYIVIGVGNSALTLHWFRKGSSIGK | 400 |

[1214] Nucleic acid and amino acid sequences for each of DENV-1, DENV-2, DENV-3, and DENV-4 are shown in Tables 28 and 29, respectively.

### Example 26: Dengue Virus RNA Vaccine Immunogenicity in Mice

[1215] This study provides a preliminary analysis of the immunogenicity of a nucleic acid mRNA vaccine using a Dengue virus (DENV) serotype 2 antigen in BALB/c mice. The study utilizes 44 groups of 10 BALB/c female (5) and male (5) mice (440 total, 6-8 weeks of age at study initiation, see Table 10 for design summary). In this study, construct numbers used are referenced and found in Table 28.

[1216] Mice were vaccinated on weeks 0 and 3 via intramuscular (IM) or intradermal (ID) routes. One group remained unvaccinated and one was administered 10⁵ plaque-forming units (PFU) live DENV2, D2Y98P isolate via intravenous (IV) injection as a positive control. Serum was collected from each mouse on weeks 1, 3, and 5; bleeds on weeks 1 and 3 were in-life samples (tail vein or submandibular bleeds) and week 5 will be a terminal (intracardiac) bleed. Individual serum samples were stored at −80° C. until analysis by neutralization or microneutralization assay. Pooled samples from each group at the week 5 time points were tested by Western blot for reactivity with viral lysate.

[1217] Signal was detected in groups 5, 15, 39, and 44 (live virus control) by a band that appeared between 50 and 60 kDa in the Western blot data. The data suggests that a mRNA vaccine to a single dengue viral antigen can produce antibody in preliminary studies.

[1218] In order to provide a Dengue vaccine having enhanced immunogenicity, RNA vaccines for concatemeric antigens were designed and tested according to the invention. These vaccines, which have significantly enhanced activity, in comparison to the single protein antigens described herein, are described below.

### Example 27: in Silico Prediction of T Cell Epitopes for RNA Vaccine Design

[1219] Several peptide epitopes from Dengue virus were generated and tested for antigenic activity. The peptide epitopes are designed to maximize MHC presentation. In general the process of MHC class I presentation is quite inefficient, with only 1 peptide of 10,000 degraded molecules actually being presented. Additionally the priming of CD8 T cell with APCs having insufficient densities of surface peptide/MHC class I complexes results in weak responders exhibiting impaired cytokine secretion and a decrease memory pool. Thus, the process of designing highly effective peptide epitopes is important to the immunogenicity of the ultimate vaccine.

[1220] In silico prediction of desirable peptide epitopes was performed using Immune Epitope Database. Using this database several immunogenic Dengue T cell epitopes showing strong homology across all 4 Dengue serotypes were predicted. Examples of these epitopes are shown in FIGS. 8A-8C and 9A-9C.

### Example 28: Prediction of DENV T Cell Epitopes for RNA Vaccine Design

[1221] The design of optimized vaccination systems to prevent or treat conditions that have failed to respond to more traditional treatments or early vaccination strategies relies on the identification of the antigens or epitopes that play a role in these conditions and which the immune system can effectively target. T cell epitopes (e.g., MHC peptide binding) for the various alleles shown in Table 32 were determined using Rapid Epitope Discovery System (ProImmune REVEAL & ProVE®-see Tables 33-40 for peptides). This system is used to identify those candidate epitopes that actually cause relevant immune responses from the numerous other potential candidates identified using algorithms to predict MHC-peptide binding. The REVEAL binding assay determines the ability of each candidate peptide to bind to one or more MHC I class alleles and stabilize the MHC-peptide complex. The assay identifies the most likely immunogenic peptides in a protein sequence by comparing the binding to that of a high affinity T cell epitope and detecting the presence or absence of the native conformation of the MHC-peptide complex. The epitope peptides are further tested using the assays described herein to confirm their immunogenic activity.

### Example 29: Activity Testing for Predicted Peptide Epitopes

[1222] Exemplary peptide epitopes selected using the methods described above were further characterized. These peptide epitopes were confirmed to have activity using in vitro HLA binding assays (human lymphocyte binding assays). Peptides (9 aa peptides from the dengue antigen) were screened for their ability to bind to HLA. The analysis of the homology, affinity, frequency and design of these peptides is shown in FIGS. 8A-8C and 9A-9C.

### Example 30: In Vivo Analysis of Mimectopes of Predicted Human Epitopes RNA Vaccines

### Methods

[1223] IFNγ ELISpot. Mouse IFNγ ELISpot assays were performed using IFNγ coated Millipore IP Opaque plates according to the manufacturer's mouse IFNγ ELISPOT guidelines. Briefly, the plates were blocked using complete RPMI (R₁₀) and incubated for 30 minutes prior to plating cells. Peptides (284-292, 408-419 or 540-548) were diluted to 5 different concentrations for stimulation at 5, -6, -7, -8, or -9 from an original stock concentration of 10 mM⁽⁻²⁾. Mouse splenocytes (200,000-250,000 cells) were plated in appropriate wells with peptide, PMA+Ionomycin or R10 media alone. Cells were stimulated in a total volume of 125 μL per well. Plates were then incubated at 37° C., 5% CO₂ for 18-24 hrs. Plates were developed following the manufacturer's instructions. Plates were counted and quality controlled using the automated ELISPOT reader CTL ImmunoSpot/FluoroSpot.

[1224] Intracellular Cytokine Staining (ICS). Intracellular Cytokine Staining (ICS). For intracellular cytokine staining, individual splenocytes, were resuspended at a concentration of 1.5×10⁶ cells per mL. Peptides (284-292, 408-419 or 540-548) were made into 5 dilutions from a stock concentration of 10 mM⁽⁻²⁾. The final concentrations of each peptide were −5, −6, −7, −8, or −9 in their respective wells. Cells were stimulated in a final volume of 200 μL within a 96 well culture plate. After the addition of Golgi plug (0.2 μL per well), cells were incubated at 37° C., 5% CO₂ for 5 hours. Following stimulation, cells were surface stained, fixed, washed and put at 4° C. overnight. Intracellular staining was performed the following day, resulting in full panel of Live/Dead (Invitrogen), αCD3, αCD4, αCD8, αCD45, αCCR7, αCD44, αCD25, αIL-2, αIFNγ, and αTNFα (BD Biosciences). Cells were acquired in a 96-U bottom plate using BD LSR Fortessa HTS (BD Biosciences).

### Results

[1225] The exemplary peptide epitopes selected using the methods described herein were used to produce tests mouse mimectopes of the predicted human epitopes. These mimectopes were analyzed for in vivo activity using restimulation assays during the acute phase of Dengue infection (Day 7). The methods were performed on dengue-infected IFNαβ/γ-receptor-deficient mice (AG129). Seven days post infection splenocytes were harvested and subjected to an ELISPOT assay to quantify secretion of cytokines by T cells (CD8) as described above. Briefly, the isolated splenocytes were stimulated with the test peptides and tested for T cell activation. If the peptide is an appropriate antigen, some cells would be present antigen during infection and would be capable of stimulating T cells. The methods for analyzing the T cell activation were performed as follows:
[1226] T cells (at a known concentration) were incubated with a specific antigen in a cell culture well
[1227] the activated T cells were transferred to ELISPOT plates (precoated with anti-cytokine antibody)
[1228] the cells were incubated such that cytokines could be secreted
[1229] the cells were washed off the plate and enzyme coupled secondary Ig was added
[1230] the plates were washed and substrate was added
[1231] positive spots were scored under microscope.

[1232] The data is shown in FIGS. 10 and 11. FIGS. 10 and 11 are graphs depicting the results of an ELISPOT assay of dengue-specific peptides measuring IFN-γ (spots per million splenocytes).

[1233] A schematic of an assay on a BLT Mouse Model (Bone Marrow/Liver/Thymus) is shown in FIG. 12. The results of a histogram analysis of human CD8 T cells stimulated with peptide epitope is also shown in FIG. 12.

The following two sequences were used as controls:

(V5)8-cathb:
(SEQ ID NO: 361)
Kozak Start GKPIPNPLLGLDST-GFLG-GKPIPNPLLGLDST-
GFLG-GKPIPNPLLGLDST-GFLG-GKPIPNPLLGLDST-GFLG-
GKPIPNPLLGLDST-GFLG-GKPIPNPLLGLDST-GFLG-
GKPIPNPLLGLDST-GFLG-GKPIPNPLLGLDST Stop
(v5)8-cathb + MHCi:
(SEQ ID NO: 362)
Kozak Start GKPIPNPLLGLDST-GFLG-GKPIPNPLLGLDST-
GFLG-GKPIPNPLLGLDST-GFLG-GKPIPNPLLGLDST-GFLG-
GKPIPNPLLGLDST-GFLG-GKPIPNPLLGLDST-GFLG-
GKPIPNPLLGLDST-GFLG-GKPIPNPLLGLDST Stop

Some results are shown in Table 41.

### Example 31: AG129 Mouse Challenge of Mimectopes of Predicted Human Epitopes from DENV2

[1234] A study is performed on AG129 mouse using a cocktail of 2 peptide epitopes. The immunogenicity of the peptide epitopes is determined in AG129 mice against challenge with a lethal dose of mouse-adapted DENV 2 strain D2Y98P. AG129 mice, which lack IFN α/β and γ receptor signaling, injected intradermally in the footpad with 10⁴ PFU of DENV do not survive past day 5 post-injection. AG129 mice are vaccinated via intramuscular (IM) injection with either 2 μg or 10 μg of a cocktail of 2 peptide epitopes. The vaccines are given to AG129 mice with a prime and a boost (day 0 and day 28). The positive control group is vaccinated with heat-inactivated DENV 2. Phosphate-buffered saline (PBS) is used as a negative control. On day 56, mice are challenged with mouse-adapted DENV 2 and monitored for 10 days for weight loss, morbidity, and mortality. Mice that display severe illness, defined as >30% weight loss, a health score of 6 or above, extreme lethargy, and/or paralysis are euthanized.

### Example 32: “Humanized” DENV Peptides Mouse Immunogenicity Study

[1235] A study analyzing immunogenicity of the peptide epitopes on humanized mice is performed. A single-dose cocktail (30 μg) containing 3 different peptide epitopes are delivered by IM route of immunization with prime and boost (day 0, day 28). A T cell (ELISPOT and ICS) characterization may be performed on Day 7, Day 28, and Day 56.

### Example 33: Testing of Non-Human Primate (NHP) Mimectopes of Predicted DENV Human Epitopes

[1236] Non-human primate (NHP) mimectopes to the human epitopes may also be developed and tested for activity in NHP assays. The NHP mimectopes are designed based on the human antigen sequence. These mimectopes may be analyzed for in vivo activity in an NHP model using, for instance, restimulation assays. Once the NHPs have been infected, immune cells may be isolated and tested for sensitivity of activation by the particular mimectopes.

### Example 34: Targeting of DENV Concatemeric Constructs Using Cytoplasmic Domain of MHC I

[1237] MHC-1_V5 concatemer constructs were developed and transfected in Hela cells. Triple immunofluorescence using Mitotracker Red (mitochondria), anti-V5, and anti-MHC-1 antibodies plus DAPI was performed. MHC-1_V5 concatemer transfection in HeLa cells shows V5-MHC1 colocalization. MHC-1_V5 concatemer transfection also shows V5 has homogeneous cytoplasmic distribution and preferentially colocalizes with MHC1 and not with Mitotracker. These data demonstrate that the V5 concatemer with the cytoplasmic domain from MHC class I co-localizes with MHC class I expression, while the V5 concatemer without this sequence is only found in the cytoplasm following transfection in Hela cells.

### Example 35: In Vivo Analysis of DENV Concatemeric mRNA Epitope Construct

[1238] The Dengue concatemers used in this study consist of 8 repeats of the peptide TALGATEI (SEQ ID NO: 363), a mouse CD8 T cell epitope found in the DENV2 envelope.

[1239] The peptide repeats were linked via cathepsin B cleavage sites and modified with the various sequences as follows:
[1240] (1) TALGATEI (SEQ ID NO: 363) peptide concatemer with no modification
[1241] (2) TALGATEI (SEQ ID NO: 363) peptide concatemer with IgKappa signal peptide
[1242] (3) TALGATEI (SEQ ID NO: 363) peptide concatemer with PEST sequence
[1243] (4) TALGATEI (SEQ ID NO: 363) peptide concatemer with IgKappa signal peptide and PEST sequence
[1244] (5) TALGATEI (SEQ ID NO: 363) peptide concatemer with MHC class I cytoplasmic domain
[1245] (6) TALGATEI (SEQ ID NO: 363) peptide concatemer with IgKappa signal peptide and MHC class I cytoplasmic domain
[1246] (7) Heat-inactivated DENV2 (D2Y98P)
[1247] (8) No immunization

[1248] The immunogenicity of the peptide concatemeric candidate vaccines was determined in AG129 mice against challenge with a lethal dose of DENV strain D2Y98P. AG129 mice, which lack IFN α/β and γ receptor signaling, injected intradermally in the footpad with 10⁴ PFU of DENV do not survive past day 5 post-injection. (In this study, the mice died due to a problem with the heat-attenuation). The tested vaccines included constructs (1)-(8) disclosed above. AG129 mice were vaccinated via intramuscular (IM) injection with either 2 μg or 10 μg of the candidate vaccine. The vaccines were given to AG129 mice as a prime and a boost (second dose provided 28 days after the first dose). The positive control group was vaccinated with heat-inactivated DENV2. Phosphate-buffered saline (PBS) was used as a negative control.

[1249] On day 56, mice were challenged with mouse-adapted DENV2 and monitored for 10 days for weight loss, morbidity, and mortality. Mice that displayed severe illness, defined as >30% weight loss, a health score of 6 or above, extreme lethargy, and/or paralysis were euthanized. Notably, mice “vaccinated” with heat-inactivated DENV (positive control group) became morbid and died (they were not included in the challenge portion of the study).

[1250] In addition, individual serum samples were collected prior to challenge on day 54 and PBMCs were isolated and frozen for subsequent testing.

[1251] The AG129 mice PBMCs were thawed and stimulated with TALGATEI (SEQ ID NO: 363) peptide for 5 hours in a standard intracellular cytokine assay. For intracellular cytokine staining, PBMCs were thawed and suspended in media. The TALGATEI (SEQ ID NO: 363) peptide was administered to stimulate the cells. After the addition of Golgi plug, cells were incubated at 37° C., 5% CO₂ for 5 hours. Following stimulation, cells were surface stained, fixed, washed and put at 4° C. overnight. Intracellular staining was performed the following day and assayed via ELISPOT assay to quantify secretion of cytokines by T cells (CD8) as described above to determine T cell activation. If the peptide were an appropriate antigen, some cells would be present antigen during infection and would be capable of stimulating T cells. The results are shown in FIGS. 13A and 13B, which demonstrate that each of the peptides (1)-(6) stimulate T cell activation.

### Example 36: Surface-Expressed DENV2 prME Antigens

[1252] The DENV2 prME polypeptide antigen sequences provided in Tables 28 and 29 were tested to confirm that the DENV prME protein antigen is translated, properly folded and expressed on the surface of cells. For the polypeptide sequences, the bolded sequence is Dengue signal sequence, the underlined sequence is DENV2 precursor membrane sequence, and the unmarked sequence is DENV2 envelope sequence. The sequences encoding the polypeptides are codon-optimized. HeLa cells were transfected with DNA encoding the prMEs from nine different DENV2 isolates. After 24 hours, surface expression of the prME was detected using three different antibodies followed by goat-anti-human AF700 secondary antibody and subjecting the cells to FACS analyses. Each of the three antibodies is broadly neutralizing DENV2 prME antibodies that have in vivo efficacy against Dengue virus. D88 binds to DIII of Envelope protein for all 4 DENV serotypes (US20150225474). 2D22 binds to DIII of Envelope protein for DENV 2 serotype. 5J7 binds to 3 domains of Envelope protein for DENV 3 serotype. FIG. 14B shows that the D88 and 2D22 antibodies recognize two of the DENV2 prME antigens. These results show that the two DENV2 prME antigens identified as Thailand/01 68/1979 and Peru/IQT29 13/1996 are expressed at the cell surface in a conformationally correct form and are excellent vaccine candidates (FIG. 14A). FIG. 14B shows a repeat of staining in triplicate and in two different cell lines (HeLa and 293T). These results confirm proper conformation of expressed DENV2 prME antigens (in particular, the prME antigens from Thailand/01 68/1979 and Peru/IQT29 13/1996) and also evidence at least non-inferior and even superior DENV2 antigenicity as compared to Dengvaxia (CYD-TDV), a live attenuated tetravalent chimeric vaccine. Antigen expressed from the mRNA encoding DENV 2 prME from Peru/IQT2913/1996 shows the best binding to 2 different DENV2 antibodies in 293T cells and in HeLa cells (D88-binds all 4 serotypes 2D22-binds DENV 2). This construct has a single amino acid difference from the DENV 2 Envelope III Domain immunodeterminant region (see bold, underline in SEQ ID NO: 273, DENV 2 prME (Peru/IQT2913/1996) in Table 29).

### Example 37: OVA Multitope In Vitro Screening Assay Kinetic Analysis

[1253] Antigen surface presentation is an inefficient process in the antigen presenting cells (APC). Peptides generated from proteasome degradation of the antigens are presented with low efficiency (only 1 peptide of 10000 degraded molecules is actually presented). Thus, priming of CD8 T cells with APCs provides insufficient densities of surface peptide/MHC I complexes, resulting in weak responders exhibiting impaired cytokine secretion and decreased memory pool. To improve DENV mRNA vaccines encoding concatemeric DENV antigens, an in vitro assay was designed to test the linkers used to connect peptide repeats, the number of peptide repeats, and sequences known to enhance antigen presentation.

[1254] mRNA constructs encoding one or more OVA epitopes were configured with different linker sequences, protease cleavage sites, and antigen presentation enhancer sequences. Their respective sequences were as shown in Table 43. To perform the assay, 200 ng of each MC3-formulated mRNA construct was transfected into JAWSII cells in a 24-well plate. Cells were isolated at 6, 24, and 48 hours post transfection and stained with fluorescently-labeled Anti-Mouse OVA257-264 (SIINFEKL (SEQ ID NO: 364)) peptide bound to H-2Kb. Staining was analyzed on a LSRFortessa flow cytometer. Samples were run in triplicate. The Mean Fluorescent Intensity (MFI) for each mRNA construct was measured and shown in FIG. 15. Constructs 2, 3, 7, 9, and 10 showed enhanced surface presentation of the OVA epitope, indicating that the configurations of these constructs may be used for DENV mRNA vaccine. Construct 5 comprises a single OVA peptide and a KDEL sequence that is known to prevent the secretion of a protein. Construct 5 showed little surface antigen presentation because the secretion of the peptide was inhibited.

### Example 38: Antibody Binding to DENV-1, 2, 3, and 4 prME Epitopes

[1255] DENV mRNA vaccines encoding concatemeric antigen epitopes were tested for binding to antibodies known to recognize one or more DENV serotypes. To test antibody binding to the epitopes, 200 ng of DENV mRNA vaccines encoding different Dengue prME epitopes were transfected into HeLa cells in 24-well plates using the TransitIT-mRNA Transfection Kit (Mirus Bio). The DENV mRNA vaccine constructs are shown in Table 28. Transfections were done in triplicate. After 24 hours, surface expression was detected using four different antibodies (10 μg/mL) followed by either goat-anti-human or anti-mouse AF700 secondary antibody (1/500). Signal generated from antibody binding are shown as Mean Fluorescent Intensity (MFI) (FIG. 16). Antibody D88 is known to recognize all 4 serotypes and bound to all antigen epitopes encoded by the DENV mRNA vaccine constructs tested. Antibody 2D22 is known to recognize only DENV 2 and preferentially bound to construct 21, which encodes DENV 2 antigen epitopes. Antibody 2D22 also showed weak binding to epitopes of other DENV serotypes. Antibody 5J7 is known to recognize only DENV 3 and only bound to antigen epitopes encoded by constructs 13, 19, and 20, which encode DENV 3 antigen epitopes. Antibody 1-11 is known to bind strongly to DENV 1 and 2, to bind weakly to DENV 3 and to bind little DENV 4. Antibody 1-11 bound to DENV 1, 2, and 3, and binding to DENV 3 antigen epitopes was stronger than binding to DENV 1 or 2 (FIG. 16).

### Example 39: DENV prME Challenge Study in Cynomolgus (Cyno) Monkey Model

[1256] Shown in Table 45 is the design of DENV prME challenge study in cynomolgus (cyno) money. Indicated DENV mRNA vaccine encoding prME antigen epitopes, or vaccines thereof, are used to immunize cyno. The vaccines are formulated in lipid nanoparticles (e.g., MC3 formulation) and administered to the cyno monkeys intramuscularly on day 0, 21, and 42. Dosages of the vaccines are 250 μg or 5 μg per immunization. In experiments where a combination of different DENV mRNA vaccines are used, 250 μg or 5 μg of each mRNA vaccine is used. FLAG-tagged H10N8 flu vaccine is used as control at a dosage of 250 μg per immunization. Naïve cyno monkeys without immunization are also used as control. Cyno monkey sera are collected on days 20, 41, 62, and 92 post initial immunization and used for serotype-specific neutralization assays.

[1257] Immunized cyno monkeys are challenged on day 63 post initial immunization with indicated DENV viruses. Cyno monkey sera are collected on days 62 (pre-challenge), 63-66, 68, 70, 72, 76, and 92 (end of life) to determine serum viral load.

### Example 40: Dengue 2 prME Challenge Study in AG129 Mice

[1258] The instant study was designed to evaluate the efficacy of four DENV mRNA vaccine constructs (constructs 21-24 in Table 44) in AG129 mice challenge assays. The schedule of the challenge study is shown in FIG. 17A. The DENV mRNA vaccines were formulated in lipid nanoparticles (e.g., MC3 formulation) and administered to the AG129 mice intramuscularly on days 0 and 21. Dosages of the vaccines were 2 μg or 10 μg per immunization. Heat inactivated D2Y98P strain was used as a negative control to vaccinate the mice. Naïve AG129 mice without immunization were also used as control.

[1259] Immunized AG129 mice were challenged on day 42 post initial immunization with Dengue D2Y98P virus (s.c., 1e5 PFU per mouse). AG129 mice sera were collected on days 20 and 41 post initial immunization and used for serotype-specific neutralization assays. Mice immunized with any of the four DENV mRNA vaccine constructs survived, while the control mice died. These data demonstrate that, after lethal challenge, there was 100% protection provided by each mRNA vaccine construct, regardless of dose. The weights and health of the mice were monitored and the results were plotted in FIGS. 17C-17D.

[1260] Mice sera collected from mice immunized with 2 μg of the DENV mRNA vaccines were able to neutralize several DENV 2 strains and variations in the neutralization ability between the tested mRNA vaccines and between different DENV 2 strains were observed (FIG. 18).

### Example 41: DENV prME Challenge Study in AG129 Mouse Model

[1261] Shown in Table 46 is the design of a DENV prME challenge study in AG129 mice, including the mRNA constructs tested, the vaccination schedule, the dosage, the challenge strains, and the serum collection schedule.

[1262] Indicated DENV mRNA vaccines encoding prME antigen epitopes, or vaccines thereof, were used to immunize AG129 mice. The vaccines were formulated in lipid nanoparticles (e.g., MC3 formulation) and administered to the mice intramuscularly on days 0 and 21. Dosages of the vaccines were 2 μg or 10 μg per immunization. In experiments where a combination of different DENV mRNA vaccines was used, 2 μg of each mRNA vaccine was used. Naïve AG129 mice without immunization were used as control. AG129 mice sera were collected on days 20 and 41 post initial immunization and used for serotype-specific neutralization assays.

[1263] Immunized AG129 mice were challenged on day 42 post initial immunization with Dengue D2Y98P virus (s.c., 1e5 PFU per mouse). The weights and health of the mice were monitored for 14 days post infection and the results were plotted in FIGS. 19A-19I.

### Example 42: Virus-Like Particles

[1264] The antigens produced from the DENV prME mRNA vaccines of the present disclosure, when expressed, are able to assemble into virus-like particles (VLPs). The instant study was designed to evaluate the immunogenicity of the VLPs by negative stain electron microscope imaging. DENV mRNA vaccine constructs 21-24 were expressed and VLPs were assembled an isolated. The VLPs were visualized under negative stain electron microscopy. Construct 23 is the vaccine construct used by Sanofi in its DENV vaccines. Constructs 21, 22, and 24 produced more uniform VLPs, suggesting that these VLPs may be more superior in their immunogenicity than the VLPs produced from construct 23.

### Example 43: Exemplary Nucleic Acids Encoding CHIKV RNA Polynucleotides for Use in a RNA Vaccine

[1265] Exemplary sequences that can be used to encode CHIKV E1, E2, E1-E2, and C-E3-E2-6K-E1 RNA polynucleotides for use in the CHIKV RNA vaccine are given in Table 47.

### Example 44: Protocol to Determine Efficacy of mRNA-Encoded Chikungunya Antigen Candidates Against CHIKV

[1266] Chikungunya virus (CHIKV) has a polycistronic genome and different antigens, based on the Chikungunya structural protein, are possible. There are membrane-bound and secreted forms of E1 and E2, as well as the full length polyprotein antigen, which retains the protein's native conformation. Additionally, the different CHIKV genotypes can also yield different antigens.

[1267] The efficacy of CHIKV candidate vaccines in AG129 mice against challenge with a lethal dose of CHIKV strain 181/25 was investigated. A129 mice, which lack IFN α/β receptor signaling, injected intradermally in the footpad with 104 PFU of CHIKV 181/25 virus have a 100% survival rate post-injection. In contrast, AG129 mice, which lack IFN α/β and γ receptor signaling, injected intradermally in the footpad with 104 PFU of CHIKV 181/25 virus do not survive past day 5 post-injection. The tested vaccines included: MC3-LNP formulated mRNA encoded CHIKV-E1, MC3-LNP formulated mRNA encoded CHIKV-E2, and MC3-LNP formulated mRNA encoded CHIKV-E1/E2/E3/C. Fifteen groups of five AG129 mice were vaccinated via intradermal (ID) or intramuscular (IM) injection with either 2 μg or 10 μg of the candidate vaccine. The vaccines were given to AG129 mice as single or two doses (second dose provided 28 days after the first dose). The positive control group was vaccinated via intranasal instillation (20 μL volume) with heat-inactivated CHIKV. Phosphate-buffered saline (PBS) was used as a negative control.

[1268] On day 56, mice were challenged with 1×10⁴ PFU of CHIKV via ID injection in a 50 μL volume and monitored for 10 days for weight loss, morbidity, and mortality. Mice that displayed severe illness, defined as >30% weight loss, a health score of 6 or above, extreme lethargy, and/or paralysis were euthanized. Notably, mice “vaccinated” with heat-inactivated CHIKV (positive control group) became morbid and were euthanized following the second dose of HI-CHIKV (they were not included in the challenge portion of the study).

[1269] In addition, individual samples were tested for reactivity in a semi-quantitative ELISA for mouse IgG against either Chikungunya-specific E1 (groups 1-4), Chikungunya-specific E2 (groups 5-8), or Chikungunya-specific E1 and E2 proteins (groups 9-15).

[1270] The health status is scored as indicated in Table 51.

### Example 45: Efficacy of Chikungunya E1 Antigen mRNA Vaccine Candidate

[1271] AG129 mice (n=5 per group) were vaccinated with 2 μg or 10 μg of MC-3-LNP formulated mRNA encoding CHIKV E1. The AG129 mice were vaccinated on either Day 0 or Days 0 and 28 via IM or ID delivery. On Day 56 following final vaccination all mice were challenged with a lethal dose of CHIKV. The survival curve, percent weight loss, and health status of the mice vaccinated with 2 μg CHIKV E1 mRNA are shown in FIGS. 21A-21C. The survival results are tabulated in Table 52. The survival curve, percent weight loss, and health status of the mice vaccinated with 10 μg CHIKV E1 mRNA are shown in FIGS. 24A-24C. The survival results are tabulated in Table 53.

[1272] As shown in Table 52, the 2 μg dose of CHIKV E1 mRNA vaccine gave no protection post-CHIKV infection challenge when administered via IM or ID with either a single dose or two doses. Likewise, the single dose of 10 μg CHIKV E1 vaccine provided little to no protection when administered via IM or ID. However, as indicated in Table 53, the 10 μg dose of CHIKV E1 mRNA vaccine provided 60% protection post-CHIKV challenge when administered via IM using two doses and provided 80% protection post-CHIKV challenge when administered via ID using two doses.

[1273] In all experiments, the negative control mice had a ˜0% survival rate, as did the positive control mice (heat-inactivated CHIKV), which died before CHIKV challenge. Some mice died during the vaccination period.

### Example 46: Efficacy of Chikungunya E2 Antigen mRNA Vaccine Candidate

[1274] AG129 mice (n=5 per group) were vaccinated with 2 μg or 10 μg of MC-3-LNP formulated mRNA encoding CHIKV E2. The mice were vaccinated on either Day 0 or Days 0 and 28 via IM or ID delivery. On Day 56 following final vaccination all mice were challenged with a lethal dose of CHIKV. The survival curve, percent weight loss, and health status of the mice vaccinated with 2 μg CHIKV E2 mRNA are shown in FIGS. 22A-22C. The survival results are tabulated in Table 54 below. The survival curve, percent weight loss, and health status of the mice vaccinated with 10 μg CHIKV E2 mRNA are shown in FIGS. 25A-25C. The survival results are tabulated in Table 55.

[1275] As shown in Table 54, the 2 μg dose of CHIKV E2 mRNA vaccine gave no protection post-CHIKV infection challenge when administered via IM or ID in a single dose. However, when provided in two doses, the 2 μg dose of CHIKV E2 mRNA vaccine provided 80% protection when administered via IM and 100% protection when administered via ID post-CHIKV challenge. As indicated in Table 55, the 10 μg dose of CHIKV E2 mRNA mouse provided no protection post-CHIKV challenge when administered via IM or ID in a single dose. However, administration of CHIKV E2 mRNA via IM or ID using two doses provided 100% protection post-CHIKV challenge.

[1276] In all experiments, the negative control mice had a ˜0% survival rate, as did the positive control mice (heat-inactivated CHIKV) which died prior to CHIKV challenge. Some mice died during the vaccination period.

### Example 47: Efficacy of Chikungunya C-E3-E2-6K-E1 Antigen mRNA Vaccine Candidate

[1277] AG129 mice (n=5 per group) were vaccinated with 2 μg or 10 μg of MC-3-LNP formulated mRNA encoding CHIKV C-E3-E2-6K-E1 mRNA (SEQ ID NO: 388/401). The AG129 mice were vaccinated on either Day 0 or Days 0 and 28 via IM or ID delivery. On Day 56 following final vaccination all mice were challenged with a lethal dose of CHIKV. The survival curve, percent weight loss, and health status of the mice vaccinated with 2 μg CHIKV C-E3-E2-6K-E1 mRNA are shown in FIGS. 23A-23C. The survival results are tabulated in Table 56. The survival curve, percent weight loss, and health status of the mice vaccinated with 10 μg CHIKV C-E3-E2-6K-E1/E2/E3/C mRNA are shown in FIGS. 26A-26C. The survival results are tabulated in Table 57.

[1278] As shown in Table 56, the 2 μg dose of C-E3-E2-6K-E1 mRNA vaccine provided 100% protection post-CHIKV challenge when administered via IM in a single dose and provided 80% protection post-CHIKV challenge when administered via ID in a single dose. The 2 μg dose of C-E3-E2-6K-E1 mRNA vaccine provided 100% protection post-CHIKV challenge when administered via IM or ID in two doses. As shown in Table 57, the 10 μg dose of C-E3-E2-6K-E1 mRNA vaccine provided 100% protection post-CHIKV infection challenge when administered via IM or ID in either a single dose or in two doses.

[1279] In all experiments, the negative control mice had a ˜0% survival rate, as did the positive control mice (heat-inactivated CHIKV) which died prior to CHIKV challenge. Some mice died during the vaccination period.

### Example 48: Summary of Survival Data Using Chikungunya Antigen mRNA Vaccine Candidates CHIKV E1, CHIKV E2, and CHIKV C-E3-E2-6K-E1

[1280] Table 58 shows the survival data of the mice vaccinated with the CHIKV mRNA antigens used in the studies reported in Examples 45-47.

### Example 49: In Vitro Transfection of mRNA-Encoded Chikungunya Virus Envelope Protein

[1281] The in vitro transfection of mRNA encoding Notch and a PBS control were performed in 150k Hela cells/well transfected with 1 μg mRNA+2 μL LF2000/well in a 24 well plate. Lysate containing proteins expressed from the CHIKV envelope mRNAs transfected in HeLa cells were collected 16 hours post-transfection and then detected by Western blotting with a V5 tag-HRP antibody. The successful detection of a CHIKV envelope protein is shown in FIG. 20.

### Example 50: Detection of Immunity (Mouse IgG) Against Either Chikungunya-Specific E1, Chikungunya-Specific E2, or Chikungunya-Specific E1 and E2 Proteins

[1282] Serum samples from mice vaccinated with the CHIKV E1, E2, or E1-E2-E3-C vaccine described in Examples 45-47 were tested using a semi-quantitative ELISA for the detection of mouse IgG against either Chikungunya-specific E1, Chikungunya-specific E2, or Chikungunya-specific E1 and E2 proteins.

[1283] Fifteen groups of five mice were vaccinated via intradermal (ID) or intramuscular (IM) injection with either 2 μg or 10 μg of the candidate vaccine. The vaccines were given to AG129 mice as single or two doses (second dose provided 28 days after the first dose). On day 56, mice were challenged with 1×10⁴ PFU of CHIKV via ID injection in 50 μL volume and monitored for 10 days for weight loss, morbidity, and mortality. Mice were bled on day 7 and day 28 post-vaccination via the peri-orbital sinus (retro-orbital bleed). In addition, mice surviving the CHIKV challenge were bled 10 days post-challenge.

[1284] The individual samples were tested for reactivity in a semi-quantitative ELISA for mouse IgG against either Chikungunya-specific E1, Chikungunya-specific E2, or Chikungunya-specific E1 and E2 proteins. The results are shown in FIGS. 34-36.

[1285] The data depicting the results of the ELISA assay to identify the amount of antibodies produced in AG129 mice in response to vaccination with mRNA encoding secreted CHIKV E1 structural protein, secreted CHIKV E2 structural protein, or CHIKV full structural polyprotein C-E3-E2-6k-E1 at a dose of 10 μg or 2 μg at 28 days post immunization is shown in FIGS. 34-35. The 10 μg of mRNA encoding CHIKV polyprotein produced significant levels of antibody in both studies. The data depicting a comparison of ELISA titers from the data of FIG. 34 to survival in the data of FIG. 35 left panel is shown in FIG. 36. As shown in the survival results, the animals vaccinated with either dose (single or double administration) of mRNA encoding CHIKV polyprotein had 100% survival rates.

### Example 51: Efficacy of Chikungunya Polyprotein (C-E3-E2-6K-E1) mRNA Vaccine Candidate

[1286] AG129 mice (n=5 per group) were vaccinated with either 10 μg, 2 μg or 0.4 μg of MC-3-LNP formulated mRNA encoded CHIKV polyprotein (C-E3-E2-6K-E1) (SEQ ID NO: 388/401). The mice were vaccinated on either Day 0 or Days 0 and 28 via IM delivery. In one study, all mice were challenged on day 56 with a lethal dose of CHIKV following final vaccination. In another study, all mice were challenged on day 84 with a lethal dose of CHIKV following final vaccination. The survival curve, percent weight loss, and health status of the mice vaccinated with 10 μg, 2 μg or 0.4 μg mRNA were determined as described previously in Examples 45-47. The survival rates, neutralizing antibodies and binding antibodies were assessed. Neutralizing antibodies were also identified against three different strains of CHIKV.

[1287] The survival rates of the mice vaccinated with mRNA encoding CHIKV C-E3-E2-6k-E1 is shown in FIG. 37. The data depicts vaccination at a dose of 10 μg (left panels), 2 μg (middle panels) or 0.4 μg (right panels) at 56 days (top panels) or 112 days (bottom panels) post immunization. These data demonstrate that a single 2 μg dose of the mRNA vaccine afforded 100% protection for at least 112 days (16 weeks). Following the study out further, the data demonstrated that a single 2 μg dose of the mRNA vaccine afforded 100% protection for at least 140 days (20 weeks.)

[1288] The neutralizing antibody and binding antibody produced in treated mice is shown in FIGS. 38 and 39, respectively. As can be seen in FIGS. 38 and 39, the levels of neutralizing antibody were dependent or dose and regimen with the highest titers evident with 10 μg dosed twice (days 0 and 28). Plaque reduction neutralization tests (PRNT50 and PRNT80) were used to quantify the titer of neutralizing antibody for the virus. Antigen-binding Ab was determined by ELISA. The corresponding correlation between binding Ab and neutralizing antibodies is shown in the bottom panels of FIG. 39. Following the study out to 16 weeks showed that the highest E1 titers were achieved when 10 μg mRNA vaccine was dosed twice.

[1289] The data depicting neutralizing antibodies against three different strains of CHIKV is shown in FIG. 40. The neutralizing antibodies were tested against three different strains of CHIKV, African-Senegal (left panel), La Reunion (middle panel) and CDC CAR (right panel). FIG. 40 shows that the polyprotein-encoding mRNA vaccine elicited broadly neutralizing antibodies against the three strains tested. Sera were further tested against Chik S27 strain (Chikungunya virus (strain S27-African prototype). The data depicting neutralizing antibodies against CHIKV S27 strain is shown in FIG. 41. These data collectively show that the polyprotein encoding mRNA vaccine elicited broadly neutralizing antibodies against all four strains tested. The vaccine induced neutralizing antibodies against multiple strains of Chikungunya. The prime and boost with the 10 μg dose produced the most robust neutralizing antibody response followed by the single dose with 10 μg.

### Example 52: Transfection of mRNA Encoded CHIKV Structural Proteins

[1290] In vitro transfection of mRNA encoding CHIKV structural proteins and PBS control were performed in 400 k HeLa cells transfected with 1.25 μg mRNA lipoplexed with 5ul LF2000/well in 6 well plate. Protein detection in HeLa cell lysate 16h post transfection was measured. Lysates which contain proteins expressed from the CHIKV mRNAs transfected in HeLa were collected 16h post transfection. Proteins were detected by WB with anti-Flag or and V5 antibody.

[1291] The mRNA encoded CHIKV structural proteins and protein production in the HeLa cell lysate 16h post transfection was detected.

### Example 53: Exemplary CHIKV Polypeptides

[1292] The amino acids presented in the Table 48 are exemplary CHIKV antigenic polypeptides. To the extent that any exemplary antigenic peptide described herein includes a flag tag or V5, or a polynucleotide encodes a flag tag or V5, the skilled artisan understands that such flag tag or V5 is excluded from the antigenic polynucleotide in a vaccine formulation. Thus, any of the polynucleotides encoding proteins described herein are encompassed within the compositions of the invention without the flag tag or V5 sequence.

### Example 54: Efficacy of CHIKV mRNA Vaccine X Against CHIKV in AG129 Mice

### Study Design

[1293] Chikungunya virus (CHIKV) 181/25 strain is an attenuated vaccine strain that was developed by the US Army via multiple plaque-to-plaque passages of the 15561 Southeast Asian human isolate (Levitt et al.). It is well tolerated in humans and is highly immunogenic. It produces small plaques and has decreased virulence in infant mice and nonhuman primates. When the attenuated virus is administered to immunodeficient AG129 mice (lacking the IFN-α/β and γ receptors) the mice succumb to a lethal disease within 3-4 days with ruffled fur and weight loss (Partidos, et al. 2011 Vaccine).

[1294] This instant study was designed to evaluate the efficacy of CHIKV candidate vaccines as described herein in AG129 mice (Table 59). The study included 14 groups of female 6-8 week old AG129 mice (Table 59). Groups 1-4, 7-8, and 10-15 were vaccinated with CHIKV vaccine X via the intramuscular (IM; 0.05 mL) route on Day 0 and select groups received an additional boost on Day 28. Control Groups 9 and 16 received vehicle (PBS) only on Days 0 and 28 via IM route (0.05 mL). Regardless of vaccination schedule, Groups 1-4 and 7-9 were challenged on Day 56 while Groups 10-16 were challenged on Day 112 using the CHIKV 181/25 strain (stock titer 3.97×10⁷ PFU/mL, challenge dose 1×10⁴ PFU/mouse). For virus challenge, all mice received a lethal dose (1×10⁴ PFU) of Chikungunya (CHIK) strain 181/25 via intradermal (ID) route (0.050 mL via footpad). All mice were monitored for 10 days post infection for weight loss, morbidity, and mortality. Each mice was assigned a heath score based on Table 51. Mice displaying severe illness as determined by >30% weight loss, a health score of higher than 5, extreme lethargy, and/or paralysis were euthanized with a study endpoint of day 10 post virus challenge. Test bleeds via retro-orbital (RO) collection were performed on mice from all groups on Days-3, 28, and 56. Mice from Groups 10-16 were also bled on Days 84 & 112. Mice that survived challenge were also terminally bled on Day 10 post challenge. Serum samples from mice (Days −3, 28, 56, 84, 112 and surviving mice) were kept frozen (−80° C.) and stored until they were tested for reactivity in a semi quantitative ELISA for mouse IgG against either E1, E2 or CHIKV lysate.

### Experimental Procedure

### Intramuscular (IM) Injection of Mice

[1295] 1. Restrain the animal either manually, chemically, or with a restraint device.
[1296] 2. Insert the needle into the muscle. Pull back slightly on the plunger of the syringe to check proper needle placement. If blood is aspirated, redirect the needle and recheck placement again.
[1297] 3. Inject appropriate dose and withdraw needle. Do not exceed maximum volume. If the required volume exceeds the maximum volume allowed, multiple sites may be used with each receiving no more than the maximum volume.
[1298] 4. The injection site may be massaged gently to disperse the injected material.

### Intradermal (ID) Injections of Mice

[1299] 1. Restrain the animal either manually, chemically, or with a restraint device.
[1300] 2. Carefully clip the hair from the intended injection site. This procedure can be done upon animals arriving or the day before any procedures or treatments are required.
[1301] 3. Lumbar area is the most common site for ID injections in all species, but other areas can be used as well.
[1302] 4. Pinch or stretch the skin between your fingers (or tweezers) to isolate the injection site.
[1303] 5. With the beveled edge facing up, insert the needle just under the surface between the layers of skin. Inject the appropriate dose and withdraw needle. A small bleb will form when an ID injection is given properly.
[1304] 6. If the required volume exceeds the maximum volume allowed, multiple sites may be used with each receiving no more than the maximum volume.

### Retro-Orbital Bleeding in Mice

[1305] 1. Place the mice in the anesthesia chamber and open oxygen line and set to 2.5% purge. Start flow of anesthesia at 5% isoflurane.
[1306] 2. Once the animal becomes sedate, turn anesthesia to 2.5%-3% isoflurane and continue to expose the animal to the anesthesia. Monitor the animal to avoid breathing becoming slow.
[1307] 3. Remove the small rodent from anesthesia chamber and place on its back while restraining with left hand and scruff the back of the animal's neck, so it is easy to restrain and manipulate while performing the procedure with the right hand.
[1308] 4. With a small motion movement, place the capillary tube in the corner of the animal's eye close to the nostril, and rotate or spin the Hematocrit glass pipette until blood start flowing out. Collect the appropriate amount of blood needed into the appropriate labeled vial.
[1309] 5. Monitor the animal after retro-orbital bleeding is done for at least 10-15 seconds to ensure hemostasis.
[1310] 6. Place the animal back to its original cage and monitor for any other problems or issues caused while manipulating animal due to the procedure.

### Observation of Mice

[1311] 1. Mice were observed through 10 days post infection (11 days total, 0-10 days post infection).
[1312] 2. Mice were weighed daily on an Ohause scale and the weights are recorded.
[1313] 3. Survival and health of each mouse were evaluated once time a day using a scoring system of 1-7 described in Table 51.

### Infection

[1314] On either Day 56 (Groups 1-4, 7-9) or Day 112 (Groups 10-16) groups of 5 female 6-8 week old AG129 mice were infected via intradermal injection with 1×10⁴ PFU/mouse of the 181/25 strain of Chikungunya diluted in PBS. The total inoculation volume was 0.05 mL administered in the rear footpad of each animal. Mice were anesthetized lightly using 2-5% v/v of isoflurane at ˜2.5 L/min of 02 (VetEquip IMPAC6) immediately prior to infection.

### Dose Administration

[1315] In this study mice were administered 0.04 μg, 2 μg, or 10 μg of various formulations of the CHIKV vaccine X or vehicle alone (PBS) on either Day 0 or on Days 0 and 28 via the intramuscular route (0.05 mL). The material was pre-formulated and diluted in PBS by IBT prior to dosing.

### Results

[1316] Mice were immunized once (Day 0) or twice (Days 0 & 28) with either 0.04 μg, 2 μg, or 10 μg of Chikungunya mRNA vaccine X and were challenged with CHIKV strain 181/25 on either Day 56 (Groups 1-4, 7-9) or on Day 112 (Groups 10-16). Mice were monitored for a total of 10 days post infection for health and weight changes. Mice that received either 2 μg or 10 μg of the CHIKV mRNA vaccine X either once (Day 0) or twice (Days 0 and 28) were fully protected (100%) regardless of whether the mice were challenged 56 days or 112 days after the initial vaccination (FIGS. 27A-27B, Table 44). Mice receiving 0.04 μg of the CHIKV mRNA vaccine were not protected at all from lethal CHIKV infection. This efficacy data is supported by the health scores observed in the vaccinated mice in that the protected mice displayed little to no adverse health effects of a CHIKV infection (FIGS. 29A-29B). Weight loss is not a strong indicator of disease progression in the CHIKV AG129 mouse model (FIGS. 28A-28B).

[1317] Mice immunized with the CHIKV mRNA vaccine X showed increased antibody titers against CHIKV E1, E2 and CHIKV lysate as compared to the vehicle only (PBS) treated groups. Serum binding against the virus lysate yielded the highest antibody titers for all vaccinated groups (FIGS. 30A-30C, 31A-31C, 32A-32C, 33A-33C). Overall, the antibody titers were dose dependent with the highest titers observed in serum from mice vaccinated with 10 μg of CHIKV mRNA vaccine X while the lowest titers were observed in serum from mice vaccinated with 0.04 μg of the CHIKV mRNA vaccine X. Similarly, higher titers were observed in serum from mice vaccinated twice (Days 0 and 28) as compared to serum from mice vaccinated only once (Day 0). Serum obtained on Day 112 post initial vaccination still yielded increased antibody titers in mice that received either 10 μg or 2 μg of CHIKV mRNA vaccine X (FIGS. 32A-32C).

[1318] Serum from mice groups 10-16, 112 days post immunization were also tested in a Plaque Reduction Neutralization Test (PRNT). Serum from each mice was diluted from 1/20 to 1/40960 and assessed for its ability to reduce CHIKV plaque formation. The results were shown in Table 64.

### Example 55: Immunogenicity of Chikungunya Polyprotein (C-E3-E2-6K-E1) mRNA Vaccine Candidate in Rats

[1319] Sprague Dawley rats (n=5) were vaccinated with 20 μg of MC-3-LNP formulated mRNA 30 encoded CHIKV polyprotein (C-E3-E2-6K-E1) (SEQ ID NO: 388/401). The rats were vaccinated on either Day 0 or Days 0 and 14 or Days 0, 14 and 28 via IM delivery. Sera were collected on days-3, 14, 28 and 42 for ELISA testing. FIG. 42 demonstrated that there was at least a two log increase in antibody titer against CHIKV lysate post 3rd vaccination with the mRNA vaccine in normal rats.

### Example 56: Evaluation of T Cell Activation of Chikungunya P 5 Polyprotein (C-E3-E2-6K-E1) mRNA Vaccine Candidate

[1320] C57BL/6 mice (n=6 experimental group; n=3 control group) were vaccinated with 10 μg of MC-3-LNP formulated mRNA encoded CHIKV polyprotein (C-E3-E2-6K-E1) (SEQ ID NO: 388/401). The mice were vaccinated on either Day 0 or Days 0 and 28 (boost) via IM delivery. Sera was collected on days 3, 28 and 42 for ELISA testing. Animals were sacrificed on day 42 and spleens were harvested for immunological evaluation of T cells. Splenic cells were isolated and analyzed by FACS. Briefly, spleens were removed, cells isolated, and stimulated in vitro with immunogenic peptides found within either C, E1, or E2 region of CHIKV that are known to be CD8 epitopes in B6 mice. The readout for this assay was cytokine secretion (IFN-gamma and TNF-alpha), which reveals whether the vaccine induced antigen-specific T cell responses. No CD8 T cell responses were detected using the E2 or C peptide (baseline levels of IFN-gamma and TNF-alpha), whereas there was a response to the E1-corresponding peptide (average of about 0.4% IFN-gamma and 0.1% TNF). The peptides were used to stimulate T cells used in the study were E1=HSMTNAVTI (SEQ ID NO: 414), E2=IILYYYELY (SEQ ID NO: 415), and C=ACLVGDKVM (SEQ ID NO: 416).

[1321] FIG. 43 shows that the polyprotein-encoding CHIKV polyprotein vaccine elicited high antibody titers against the CHIKV glycoproteins. FIGS. 44 and 45A-45B show T cell activation by E1 peptide.

### Example 57: Proof-of-Concept of Immunogenicity in Non-Human Primates

[1322] The mRNA vaccine was tested in Cynomolgus monkey subjects (n=3 per experimental group, n=3 negative control). Subjects were given an intramuscular (IM) immunization of 25 μg or 75 μg of the vaccine on day 0 (prime), day 28 (boost), and day 56 (boost). The negative control group was administered 75 μg of non-translated irrelevant mRNA (NTIX). The readout for this experiment was serum antibody titers (binding and neutralizing) and a CHIKV-specific T cell response.

[1323] As shown in FIG. 46, the vaccine induced a robust antibody response. A response was detected after the priming dose, and then increased with the boost, and increased slightly more following the third immunization. Both the 25 μg and 75 μg vaccine groups were immunogenic, and there was a small dose response. Neutralizing titers were a few fold lower than those seen in mice, but were still robust.

[1324] FIG. 47 shows a robust CD4 response in response to the vaccine. Day 35 T cells, measured one week after the second immunization, were assayed. The peptide pool consisted of 15 mers overlapping by 11. The response was measured through peptide stimulation, followed by intracellular cytokine staining and flow cytometry. A CHIKV-specific CD4 T cell response was detected, mainly in IL-2 and TNFα. There was a minimal CD8 response as well.

[1325] Each of the sequences described herein encompasses a chemically modified sequence or an unmodified sequence (no modified nucleotides), which includes no nucleotide modifications.

Lengthy table referenced here
US20240366745A1-20241107-T00001
Please refer to the end of the specification for access instructions.

Lengthy table referenced here
US20240366745A1-20241107-T00002
Please refer to the end of the specification for access instructions.

Lengthy table referenced here
US20240366745A1-20241107-T00003
Please refer to the end of the specification for access instructions.

Lengthy table referenced here
US20240366745A1-20241107-T00004
Please refer to the end of the specification for access instructions.

Lengthy table referenced here
US20240366745A1-20241107-T00005
Please refer to the end of the specification for access instructions.

Lengthy table referenced here
US20240366745A1-20241107-T00006
Please refer to the end of the specification for access instructions.

Lengthy table referenced here
US20240366745A1-20241107-T00007
Please refer to the end of the specification for access instructions.

Lengthy table referenced here
US20240366745A1-20241107-T00008
Please refer to the end of the specification for access instructions.

Lengthy table referenced here
US20240366745A1-20241107-T00009
Please refer to the end of the specification for access instructions.

Lengthy table referenced here
US20240366745A1-20241107-T00010
Please refer to the end of the specification for access instructions.

Lengthy table referenced here
US20240366745A1-20241107-T00011
Please refer to the end of the specification for access instructions.

Lengthy table referenced here
US20240366745A1-20241107-T00012
Please refer to the end of the specification for access instructions.

Lengthy table referenced here
US20240366745A1-20241107-T00013
Please refer to the end of the specification for access instructions.

Lengthy table referenced here
US20240366745A1-20241107-T00014
Please refer to the end of the specification for access instructions.

Lengthy table referenced here
US20240366745A1-20241107-T00015
Please refer to the end of the specification for access instructions.

Lengthy table referenced here
US20240366745A1-20241107-T00016
Please refer to the end of the specification for access instructions.

Lengthy table referenced here
US20240366745A1-20241107-T00017
Please refer to the end of the specification for access instructions.

Lengthy table referenced here
US20240366745A1-20241107-T00018
Please refer to the end of the specification for access instructions.

Lengthy table referenced here
US20240366745A1-20241107-T00019
Please refer to the end of the specification for access instructions.

Lengthy table referenced here
US20240366745A1-20241107-T00020
Please refer to the end of the specification for access instructions.

Lengthy table referenced here
US20240366745A1-20241107-T00021
Please refer to the end of the specification for access instructions.

Lengthy table referenced here
US20240366745A1-20241107-T00022
Please refer to the end of the specification for access instructions.

Lengthy table referenced here
US20240366745A1-20241107-T00023
Please refer to the end of the specification for access instructions.

Lengthy table referenced here
US20240366745A1-20241107-T00024
Please refer to the end of the specification for access instructions.

Lengthy table referenced here
US20240366745A1-20241107-T00025
Please refer to the end of the specification for access instructions.

Lengthy table referenced here
US20240366745A1-20241107-T00026
Please refer to the end of the specification for access instructions.

Lengthy table referenced here
US20240366745A1-20241107-T00027
Please refer to the end of the specification for access instructions.

Lengthy table referenced here
US20240366745A1-20241107-T00028
Please refer to the end of the specification for access instructions.

Lengthy table referenced here
US20240366745A1-20241107-T00029
Please refer to the end of the specification for access instructions.

Lengthy table referenced here
US20240366745A1-20241107-T00030
Please refer to the end of the specification for access instructions.

Lengthy table referenced here
US20240366745A1-20241107-T00031
Please refer to the end of the specification for access instructions.

Lengthy table referenced here
US20240366745A1-20241107-T00032
Please refer to the end of the specification for access instructions.

Lengthy table referenced here
US20240366745A1-20241107-T00033
Please refer to the end of the specification for access instructions.

Lengthy table referenced here
US20240366745A1-20241107-T00034
Please refer to the end of the specification for access instructions.

Lengthy table referenced here
US20240366745A1-20241107-T00035
Please refer to the end of the specification for access instructions.

Lengthy table referenced here
US20240366745A1-20241107-T00036
Please refer to the end of the specification for access instructions.

Lengthy table referenced here
US20240366745A1-20241107-T00037
Please refer to the end of the specification for access instructions.

Lengthy table referenced here
US20240366745A1-20241107-T00038
Please refer to the end of the specification for access instructions.

Lengthy table referenced here
US20240366745A1-20241107-T00039
Please refer to the end of the specification for access instructions.

Lengthy table referenced here
US20240366745A1-20241107-T00040
Please refer to the end of the specification for access instructions.

Lengthy table referenced here
US20240366745A1-20241107-T00041
Please refer to the end of the specification for access instructions.

Lengthy table referenced here
US20240366745A1-20241107-T00042
Please refer to the end of the specification for access instructions.

Lengthy table referenced here
US20240366745A1-20241107-T00043
Please refer to the end of the specification for access instructions.

Lengthy table referenced here
US20240366745A1-20241107-T00044
Please refer to the end of the specification for access instructions.

Lengthy table referenced here
US20240366745A1-20241107-T00045
Please refer to the end of the specification for access instructions.

Lengthy table referenced here
US20240366745A1-20241107-T00046
Please refer to the end of the specification for access instructions.

Lengthy table referenced here
US20240366745A1-20241107-T00047
Please refer to the end of the specification for access instructions.

Lengthy table referenced here
US20240366745A1-20241107-T00048
Please refer to the end of the specification for access instructions.

Lengthy table referenced here
US20240366745A1-20241107-T00049
Please refer to the end of the specification for access instructions.

Lengthy table referenced here
US20240366745A1-20241107-T00050
Please refer to the end of the specification for access instructions.

Lengthy table referenced here
US20240366745A1-20241107-T00051
Please refer to the end of the specification for access instructions.

Lengthy table referenced here
US20240366745A1-20241107-T00052
Please refer to the end of the specification for access instructions.

Lengthy table referenced here
US20240366745A1-20241107-T00053
Please refer to the end of the specification for access instructions.

Lengthy table referenced here
US20240366745A1-20241107-T00054
Please refer to the end of the specification for access instructions.

Lengthy table referenced here
US20240366745A1-20241107-T00055
Please refer to the end of the specification for access instructions.

Lengthy table referenced here
US20240366745A1-20241107-T00056
Please refer to the end of the specification for access instructions.

Lengthy table referenced here
US20240366745A1-20241107-T00057
Please refer to the end of the specification for access instructions.

Lengthy table referenced here
US20240366745A1-20241107-T00058
Please refer to the end of the specification for access instructions.

Lengthy table referenced here
US20240366745A1-20241107-T00059
Please refer to the end of the specification for access instructions.

Lengthy table referenced here
US20240366745A1-20241107-T00060
Please refer to the end of the specification for access instructions.

Lengthy table referenced here
US20240366745A1-20241107-T00061
Please refer to the end of the specification for access instructions.

Lengthy table referenced here
US20240366745A1-20241107-T00062
Please refer to the end of the specification for access instructions.

Lengthy table referenced here
US20240366745A1-20241107-T00063
Please refer to the end of the specification for access instructions.

Lengthy table referenced here
US20240366745A1-20241107-T00064
Please refer to the end of the specification for access instructions.

Lengthy table referenced here
US20240366745A1-20241107-T00065
Please refer to the end of the specification for access instructions.

### EQUIVALENTS

[1326] Those skilled in the art will recognize, or be able to ascertain using no more than routine experimentation, many equivalents to the specific embodiments of the disclosure described herein. Such equivalents are intended to be encompassed by the following claims.

[1327] All references, including patent documents, disclosed herein are incorporated by reference in their entirety.

LENGTHY TABLES
The patent application contains a lengthy table section. A copy of the table is available in electronic form from the USPTO web site (https://seqdata.uspto.gov/?pageRequest=docDetail&DocID=US20240366745A1). An electronic copy of the table will also be available from the USPTO upon request and payment of the fee set forth in 37 CFR 1.19(b)(3).

1-84. (canceled)

85. A Dengue virus (DENV) messenger ribonucleic acid (mRNA) vaccine, comprising:
at least one mRNA polynucleotide comprising an open reading frame encoding at least one DENV antigenic polypeptide or an immunogenic fragment thereof, wherein 100% of the uracil in the open reading frame have a chemical modification and wherein the chemical modification is a N1-methylpseudouridine; and
a lipid nanoparticle comprising a compound of Formula (I): [chemical structure]
wherein:
R₁ is selected from the group consisting of C₅₋₃₀ alkyl, C₅₋₂₀ alkenyl, and —R″M′R′;
R₂ and R₃ are independently selected from the group consisting of C₁₋₁₄ alkyl and C₂₋₁₄ alkenyl;
R₄ is —(CH₂)ₙQ, wherein Q is —OR, and n is selected from 1, 2, 3, 4, and 5;
each R₅ is H;
each R₆ is H;
M and M′ are independently selected from —C(O)O— and —OC(O)—;
R₇ is H;
R is H;
R′ is selected from the group consisting of C₁₋₁₈ alkyl and C₂₋₁₈ alkenyl;
R″ is selected from the group consisting of C₃₋₁₄ alkyl and C₃₋₁₄ alkenyl; and
m is selected from 5, 6, 7, 8, 9, 10, 11, 12, and 13.

86-185. (canceled)

186. The DENV vaccine of claim 85, wherein the at least one DENV antigenic polypeptide comprises a DENV envelope (E) protein.

187. The DENV vaccine of claim 85, wherein the at least one DENV antigenic polypeptide comprises a DENV membrane (M) protein.

188. The DENV vaccine of claim 85, wherein the at least one DENV antigenic polypeptide comprises a DENV precursor membrane (prM) protein.

189. The DENV vaccine of claim 85, wherein the at least one DENV antigenic polypeptide comprises a DENV prME protein.

190. The DENV vaccine of claim 85, wherein the at least one DENV antigenic polypeptide is from a DENV serotype selected from the group consisting of: DENV-1, DENV-2, DENV-3, DENV-4, and DENV-5.

191. The DENV vaccine of claim 190, wherein the DENV serotype is DENV-2.

192. The DENV vaccine of claim 85, wherein the lipid nanoparticle comprises 20-60 mol % ionizable cationic lipid, 5-25 mol % neutral lipid, 25-55 mol % sterol, and 0.5-15 mol % polyethylene glycol (PEG)-modified lipid.

193. The DENV vaccine of claim 192, wherein the neutral lipid is 1,2-distearoyl-sn-glycero-3-phosphocholine (DSPC), the sterol is cholesterol, the PEG-modified lipid is PEG-distearoyl glycerol (PEG-DMG).

194. The DENV vaccine of claim 192, wherein the neutral lipid is 1,2-distearoyl-sn-glycero-3-phosphocholine (DSPC), the sterol is cholesterol, the PEG-modified lipid is PEG-distearoyl glycerol (PEG-DMG), and the compound of Formula (I) is Compound 25:

[chemical structure]

195. A method comprising administering to a subject the DENV vaccine of claim 85.

196. The method of claim 195, wherein the vaccine is administered to the subject in an amount effective to produce an antigen-specific immune response in the subject.

197. A method comprising administering to a subject the DENV vaccine of claim 194.

198. The method of claim 197, wherein the vaccine is administered to the subject in an amount effective to produce an antigen-specific immune response in the subject.

The application's sequence listing, which the Patent Office published only in electronic form, follows.

SEQUENCE LISTING (469 sequences)

SEQ ID NO: 1 - DNA, 1215 bp, Plasmodium falciparum
  source 1..1215: mol_type = genomic DNA
atgatgagaaaattagctattttatctgtttcttcctttttatttgttgaggccttattccaggaataccagtgctatggaagttcgtcaaacacaagggttctaaatgaattaaattatgataatgcaggcactaatttatataatgaattagaaatgaattattatgggaaacaggaaaattggtatagtcttaaaaaaaatagtagatcacttggagaaaatgatgatggaaataacgaagacaacgagaaattaaggaaaccaaaacataaaaaattaaagcaaccagcggatggtaatcctgatccaaatgcaaacccaaatgtagatcccaatgccaacccaaatgtagatccaaatgcaaacccaaatgtagatccaaatgcaaacccaaatgcaaacccaaatgcaaacccaaatgcaaacccaaatgcaaacccaaatgcaaacccaaatgcaaacccaaatgcaaacccaaatgcaaacccaaatgcaaacccaaatgcaaacccaaatgcaaacccaaatgcaaacccaaatgcaaacccaaatgcaaacccaaatgcaaaccccaatgcaaatcctaatgcaaacccaaatgcaaacccaaacgtagatcctaatgcaaatccaaatgcaaacccaaacgcaaaccccaatgcaaatcctaatgcaaaccccaatgcaaatcctaatgcaaatcctaatgccaatccaaatgcaaatccaaatgcaaacccaaacgcaaaccccaatgcaaatcctaatgccaatccaaatgcaaatccaaatgcaaacccaaatgcaaacccaaatgcaaaccccaatgcaaatcctaataaaaacaatcaaggtaatggacaaggtcacaatatgccaaatgacccaaaccgaaatgtagatgaaaatgctaatgccaacagtgctgtaaaaaataataataacgaagaaccaagtgataagcacataaaagaatatttaaacaaaatacaaaattctctttcaactgaatggtccccatgtagtgtaacttgtggaaatggtattcaagttagaataaagcctggctctgctaataaacctaaagacgaattagattatgcaaatgatattgaaaaaaaaatttgtaaaatggaaaaatgttccagtgtgtttaatgtcgtaaatagttcaataggattaataatggtattatccttcttgttccttaat

SEQ ID NO: 2 - DNA, 1230 bp, Plasmodium falciparum
  source 1..1230: mol_type = genomic DNA
atgtggtggcgcctgtggtggctgctgctgctgctgctgctgctgtggcccatggtgtgggccgaggccttattccaggaataccagtgctatggaagttcgtcaaacacaagggttctaaatgaattaaattatgataatgcaggcactaatttatataatgaattagaaatgaattattatgggaaacaggaaaattggtatagtcttaaaaaaaatagtagatcacttggagaaaatgatgatggaaataacgaagacaacgagaaattaaggaaaccaaaacataaaaaattaaagcaaccagcggatggtaatcctgatccaaatgcaaacccaaatgtagatcccaatgccaacccaaatgtagatccaaatgcaaacccaaatgtagatccaaatgcaaacccaaatgcaaacccaaatgcaaacccaaatgcaaacccaaatgcaaacccaaatgcaaacccaaatgcaaacccaaatgcaaacccaaatgcaaacccaaatgcaaacccaaatgcaaacccaaatgcaaacccaaatgcaaacccaaatgcaaacccaaatgcaaacccaaatgcaaaccccaatgcaaatcctaatgcaaacccaaatgcaaacccaaacgtagatcctaatgcaaatccaaatgcaaacccaaacgcaaaccccaatgcaaatcctaatgcaaaccccaatgcaaatcctaatgcaaatcctaatgccaatccaaatgcaaatccaaatgcaaacccaaacgcaaaccccaatgcaaatcctaatgccaatccaaatgcaaatccaaatgcaaacccaaatgcaaacccaaatgcaaaccccaatgcaaatcctaataaaaacaatcaaggtaatggacaaggtcacaatatgccaaatgacccaaaccgaaatgtagatgaaaatgctaatgccaacagtgctgtaaaaaataataataacgaagaaccaagtgataagcacataaaagaatatttaaacaaaatacaaaattctctttcaactgaatggtccccatgtagtgtaacttgtggaaatggtattcaagttagaataaagcctggctctgctaataaacctaaagacgaattagattatgcaaatgatattgaaaaaaaaatttgtaaaatggaaaaatgttccagtgtgtttaatgtcgtaaatagttcaataggattaataatggtattatccttcttgttccttaat

SEQ ID NO: 3 - DNA, 3486 bp, Plasmodium falciparum
  source 1..3486: mol_type = genomic DNA
atgaaacatattttgtacatatcattttactttatccttgttaatttattgatatttcatataaatggaaagataataaagaattctgaaaaagatgaaatcataaaatctaacttgagaagtggttcttcaaattctaggaatcgaataaatgaggaaaagcacgagaagaaacacgttttatctcataattcatatgagaaaactaaaaataatgaaaataataaatttttcgataaggataaagagttaacgatgtctaatgtaaaaaatgtgtcacaaacaaatttcaaaagtcttttaagaaatcttggtgtttcagagaatatattccttaaagaaaataaattaaataaggaagggaaattaattgaacacataataaatgatgatgacgataaaaaaaaatatattaaagggcaagacgaaaacagacaagaagatcttgaacaagagagacttgctaaagaaaagttacaggggcaacaaagcgatttagaacaagagagacttgctaaagaaaagttgcaagaacaacaaagcgatttagaacaagagagacttgctaaagaaaagttgcaagaacaacaaagcgatttagaacaagatagacttgctaaagaaaagttacaagagcaacaaagcgatttagaacaagagagacgtgctaaagaaaagttgcaagaacaacaaagcgatttagaacgaacgaagacttctaaagaaaagttacatgagcagcaaagcgatttagaacaagagagacgtgctaaagaaaagttgcaagaacaacaaagcgatttagaacaagagagacttgctaaagaaaagttgcaagagcaacaaagcgatttagaacaagagagacttgctaaagaaaagttgcaagaacaacaaagcgatttagaacaagagagacttgctaaagaaaagttacaagagcagcaaagcgatttagaacaagagagacttgctaaagaaaagttgcaagaacaacaaagcgatttagaacaagagagacttgctaaagaaaagttgcaagaacaacaaagcgatttagaacaagatagacttgctaaagaaaagttacaagagcaacaaagcgatttagaacaagagagacttgctaaagaaaagttgcaagaacaacaaagcgatttagaacaagagagacgtgctaaagaaaagttgcaagaacaacaaagcgatttagaacaagagagacgtgctaaagaaaagttgcaagaacaacaaagcgatttagaacaagagagacgtgctaaagaaaagttgcaagaacaacaaagcgatttagaacaagagagacgtgctaaagaaaagttgcaagaacaacaaagcgatttagaacaagagagacttgctaaagaaaagttgcaagaacaacaaagcgatttagaacaagagagacgtgctaaagaaaagttgcaagaacaacaaagcgatttagaacaagagagacttgctaaagaaaagttgcaagaacaacaaagcgatttagaacaagagagacgtgctaaagaaaagttgcaagaacaacaaagcgatttagaacaagagagacgtgctaaagaaaagttgcaagaacaacaaagcgatttagaacaagatagacttgctaaagaaaagttacaagagcaacaaagcgatttagaacaagagagacgtgctaaagaaaagttgcaagaacaacaaagcgatttagaacgaacgaaggcatctacagaaacgttgcatgagcagcaaagcgatcttgaacaagagagacttgctaaagaaaagttacaagagcagcaaagcgatttagaacaagagagacttgctaaagaaaagttacaagagcaacaaagcgatttagaacgaacgaaggcatctacagaaacgttgcgtgagcagcaaagcgatcttgaacaagagaaactagctaaagaaaagttacaggggcaacaaagcgatcttgaacaagagagactagctaaagaaaagttacaggggcaacaaagcgatcttgaacaagagagactagctaaagaaaagttacaggggcaacaaagcgatcttgaacaagagagactagctaaagaaaagttacaggggcaacaaagcgatttagaacaagagagacttgctaaagaaaagttgcaagagcgacaaagcgatttagaacaagagagacttgctaaagaaaagttgcaagaacaacaaagcgatttagaacaagagagactagctaaagaaaagttgcaagaacaacaaagcgatttagaacaagacagacttgctaaagaaaagttgcaagaacaacaaagcgatttagaacaagagagactagctaaggaaaagttacaggggcagcatagcgatttagaacgaacgaaggcatctaaagaaacgttgcaagaacaacaaagcgatttagaacaagagagacttgctaaagaaaagttgcaagaacaacaaagcgatttagaacaagagagacgtgctaaagaaaagttgcaagaacaacaaagcgatttagaacaagagagacgtgctaaagaaaagttgcaagaacaacaaagcgatttagaacaagagagacgtgctaaagaaaagttgcaagagcagcaaagagatttagaacaaaggaaggctgatacgaaaaaaaatttagaaagaaaaaaggaacatggagatgtattagcagaggatttatatggtcgtttagaaataccagctatagaacttccatcagaaaatgaacgtggatattatataccacatcaatcttctttacctcaggacaacagagggaatagtagagattcgaaggaaatatctataatagaaaatacaaatagagaatctattacaacaaatgttgaaggacgaagggatatacataaaggacatcttgaagaaaagaaagatggttcaataaaaccagaacaaaaagaagataaatctgctgacatacaaaatcatacattagagacagtaaatatttctgatgttaatgattttcaaataagtaagtatgaggatgaaataagtgctgaatatgacgattcattaatagatgaagaagaagatgatgaagacttagacgaatttaagcctattgtgcaatatgacaatttccaagatgaagaaaacataggaatttataaagaactagaagatttgatagagaaaaatgaaaatttagatgatttagatgaaggaatagaaaaatcatcagaagaattatctgaagaaaaaataaaaaaaggaaagaaatatgaaaaaacaaaggataataattttaaaccaaatgataaaagtttgtatgatgagcatattaaaaaatataaaaatgataagcaggttaataaggaaaaggaaaaattcataaaatcattgtttcatatatttgacggagacaatgaaattttacagatcgtggatgagttatctgaagatataactaaatattttatgaaacta

SEQ ID NO: 4 - DNA, 5160 bp, Plasmodium falciparum
  source 1..5160: mol_type = genomic DNA
atgaagatcatattctttttatgttcatttcttttttttattataaatacacaatgtgtaacacatgaaagttatcaagaacttgtcaaaaaactagaagctttagaagatgcagtattgacaggttatagtttatttcaaaaggaaaaaatggtattaaatgaagaagaaattactacaaaaggtgcaagtgctcaaagtggtgcaagtgctcaaagtggtgcaagtgctcaaagtggtgcaagtgctcaaagtggtgcaagtgctcaaagtggtgcaagtgctcaaagtggtacaagtggtccaagtggtccaagtggtacaagtccatcatctcgttcaaacactttacctcgttcaaatacttcatctggtgcaagccctccagctgatgcaagcgattcagatgctaaatcttacgctgatttaaaacacagagtacgaaattacttgttcactattaaagaactcaaatatcccgaactctttgatttaaccaatcatatgttaactttgtgtgataatattcatggtttcaaatatttaattgatggatatgaagaaattaatgaattattatataaattaaacttttattttgatttattaagagcaaaattaaatgatgtatgtgctaatgattattgtcaaatacctttcaatcttaaaattcgtgcaaatgaattagacgtacttaaaaaacttgtgttcggatatagaaaaccattagacaatattaaagataatgtaggaaaaatggaagattacattaaaaaaaataaaacaaccatagcaaatataaatgaattaattgaaggaagtaagaaaacaattgatcaaaataagaatgcagataatgaagaagggaaaaaaaaattataccaagctcaatatgatctttctatttacaataaacaattagaagaagcacataatttaataagcgttttagaaaaacgtattgacactttaaaaaaaaatgaaaacataaagaaattacttgataagataaatgaaattaaaaatcccccaccggccaattctggaaatacaccaaatactctccttgataagaacaaaaaaatcgaggaacacgaagaaaaaataaaagaaattgccaaaactattaaatttaacattgatagtttatttactgatccacttgaattagaatattatttaagagaaaaaaataaaaaagttgatgtaacacctaaatcacaagatcctacgaaatctgttcaaataccaaaagttccttatccaaatggtattgtatatcctttaccactcactgatattcataattcattagctgcagataatgataaaaattcatatggtgatttaatgaatcctcatactaaagaaaaaattaatgaaaaaattattacagataataaggaaagaaaaatattcattaataacattaaaaaaaaaattgatttagaagaaaaaaacattaatcacacaaaagaacaaaataaaaaattacttgaagattatgaaaagtcaaaaaaggattatgaagaattacttgaaaaattttatgaaatgaaatttaataataattttaacaaagatgtcgtagataaaatattcagtgcaagatatacatataatgttgaaaaacaaagatataataataaattttcatcctctaataattctgtatataatgttcaaaaattaaaaaaggctctttcatatcttgaagattattctttaagaaaaggaatttctgaaaaagattttaatcattattatactttgaaaactggcctcgaagctgatataaaaaaattaacagaagaaataaagagtagtgaaaacaaaattcttgaaaaaaattttaaaggactaacacattcagcaaatggttccttagaagtatctgatattgtaaaattacaagtacaaaaagttttattaattaaaaaaatagaagacttaagaaagatagaattatttttaaaaaatgcacaactaaaagatagtattcatgtaccaaatatttataaaccacaaaataaaccagaaccatattatttaattgtattaaaaaaagaagtagataaattaaaagaatttataccaaaagtaaaagacatgttaaagaaagaacaagctgtcttatcaagtattacacaacctttagttgcagcaagcgaaacaactgaagatgggggtcactccacacacacattatcccaatcaggagaaacagaagtaacagaagaaacagaagaaacagaagaaacagtaggacacacaacaacggtaacaataacattaccaccaacacaaccatcaccaccaaaagaagtaaaagttgttgaaaattcaatagaacataagagtaatgacaattcacaagccttgacaaaaacagtttatctaaagaaattagatgaatttttaactaaatcatatatatgtcataaatatattttagtatcaaactctagtatggaccaaaaattattagaggtatataatcttactccagaagaagaaaatgaattaaaatcatgtgatccattagatttattatttaatattcaaaataacatacctgctatgtattcattatatgatagtatgaacaatgatttacaacatctcttttttgaattatatcaaaaggaaatgatttattatttacataaactaaaagaggaaaatcacatcaaaaaattattagaggagcaaaaacaaataactggaacatcatctacatccagtcctggaaatacaaccgtaaatactgctcaatccgcaactcacagtaattcccaaaaccaacaatcaaatgcatcctctaccaatacccaaaatggtgtagctgtatcatctggtcctgctgtagttgaagaaagtcatgatcccttaacagtattgtctattagtaacgatttgaaaggtattgttagtctcttaaatcttggaaataaaactaaagtacctaatccattaaccatttctacaacagagatggaaaaattttatgagaatattttaaaaaataatgatacctattttaatgatgatatcaaacaattcgtaaaatctaattcaaaagtaattacaggtttgaccgaaacacaaaaaaatgcattaaatgatgaaattaaaaaattaaaagatactttacagttatcatttgatttatataataaatataaattaaaattagatagattatttaataagaaaaaagaacttggccaagacaaaatgcaaattaaaaaacttactttattaaaagaacaattagaatcaaaattgaattcacttaataacccacataatgtattacaaaacttttctgttttctttaacaaaaaaaaagaagctgaaatagcagaaactgaaaacacattagaaaacacaaaaatattattgaaacattataaaggacttgttaaatattataatggtgaatcatctccattaaaaactttaagtgaagtatcaattcaaacagaagataattatgccaatttagaaaaatttagagtattaagtaaaatagatggaaaactcaatgataatttacatttaggaaagaaaaaattatctttcttatcaagtggattacatcatttaattactgaattaaaagaagtaataaaaaataaaaattatacaggtaattctccaagtgaaaataataagaaagttaacgaagctttaaaatcttacgaaaattttctcccagaagcaaaagttacaacagttgtaactccacctcaaccagatgtaactccatctccattatctgtaagggtaagtggtagttcaggatccacaaaagaagaaacacaaataccaacttcaggctctttattaacagaattacaacaagtagtacaattacaaaattatgacgaagaagatgattccttagttgtattacccatttttggagaatccgaagataatgacgaatatttagatcaagtagtaactggagaagcaatatctgtcacaatggataatatcctctcaggatttgaaaatgaatatgatgttatatatttaaaacctttagctggagtatatagaagcttaaaaaaacaaattgaaaaaaacatttttacatttaatttaaatttgaacgatatcttaaattcacgtcttaagaaacgaaaatatttcttagatgtattagaatctgatttaatgcaatttaaacatatatcctcaaatgaatacattattgaagattcatttaaattattgaattcagaacaaaaaaacacacttttaaaaagttacaaatatataaaagaatcagtagaaaatgatattaaatttgcacaggaaggtataagttattatgaaaaggttttagcgaaatataaggatgatttagaatcaattaaaaaagttatcaaagaagaaaaggagaagttcccatcatcaccaccaacaacacctccgtcaccagcaaaaacagacgaacaaaagaaggaaagtaagttccttccatttttaacaaacattgagaccttatacaataacttagttaataaaattgacgattacttaattaacttaaaggcaaagattaacgattgtaatgttgaaaaagatgaagcacatgttaaaataactaaacttagtgatttaaaagcaattgatgacaaaatagatctttttaaaaacccttacgacttcgaagcaattaaaaaattgataaatgatgatacgaaaaaagatatgcttggcaaattacttagtacaggattagttcaaaattttcctaatacaataatatcaaaattaattgaaggaaaattccaagatatgttaaacatttcacaacaccaatgcgtaaaaaaacaatgtccagaaaattctggatgtttcagacatttagatgaaagagaagaatgtaaatgtttattaaattacaaacaagaaggtgataaatgtgttgaaaatccaaatcctacttgtaacgaaaataatggtggatgtgatgcagatgccacatgtaccgaagaagattcaggtagcagcagaaagaaaatcacatgtgaatgtactaaacctgattcttatccacttttcgatggtattttctgcagttcctctaacttcttaggaatatcattcttattaatactcatgttaatattatacagtttcatt

SEQ ID NO: 5 - DNA, 1866 bp, Plasmodium falciparum
  source 1..1866: mol_type = genomic DNA
atgagaaaattatactgcgtattattattgagcgcctttgagtttacatatatgataaactttggaagaggacagaattattgggaacatccatatcaaaatagtgatgtgtatcgtccaatcaacgaacatagggaacatccaaaagaatacgaatatccattacaccaggaacatacataccaacaagaagattcaggagaagacgaaaatacattacaacacgcatatccaatagaccacgaaggtgctgaacccgcaccacaagaacaaaacttattctcaagcattgaaatagtcgaacggtcgaattatatgggtaatccgtggacggaatacatggcaaaatatgatattgaagaagttcatggttcaggtataagggtagatttaggagaggatgctgaagtagctggaactcaatacagacttccatcaggtaaatgtccagtattcggtaaaggtataattattgagaattcaaatactacttttctaacaccggtagctacaggaaatcaatatctaaaagatggagggtttgcgtttcctccaacagaacctcttatgtcaccaatgacactagatgaaatgagacatttttataaggataataaatacgtaaaaaacctcgacgaattgactttatgttcaagacatgcagggaatatgattccagataatgataaaaactcaaattataaatacccggctgtttatgatgataaagataaaaagtgtcatatcctgtatattgcagctcaagaaaataatggtcctagatattgtaataaagacgaaagtaaaagaaacagcatgttttgtttcagaccagcaaaagacataagcttccaaaactatacttacttgtctaaaaatgtagttgataactgggaaaaagtctgccctagaaagaatttacagaatgcgaaattcggactatgggtcgatggtaactgtgaagatataccacatgtaaatgaatttccagcaatagatcttttcgaatgcaataaactggtttttgaattgagtgcctcggatcagccaaaacagtatgaacaacatttaacagattacgaaaaaatcaaagaaggttttaaaaataaaaatgctagtatgatcaagagtgcttttcttcccacgggtgcttttaaggcagatcgttataaaagtcacggtaaaggatataattggggtaactataacacagagacacaaaagtgtgaaatttttaatgttaaaccaacatgtctcataaacaattcctcatacattgctaccactgctttatcccatcccatcgaagtagagaacaattttccttgtagcctatacaaagatgaaataatgaaagaaatcgagagagaatcaaaacgaattaaattaaatgataacgatgacgaggggaacaaaaaaattatagctccacgcatttttatttcagacgataaagactcgttaaaatgcccatgtgaccctgaaatggtcagtaacagtacatgccgcttctttgtatgtaaatgtgtagaaaggagggcagaagtaacatcaaataacgaggttgtagtaaaagaagaatacaaagatgagtacgcagatattcccgaacacaaaccaacctatgataagatgaaaataataatagcatcatcagctgcagttgctgtactagcgacgattttaatggtttatctttataaaagaaagggaaatgctgaaaaatatgataaaatggatgaaccgcaagattatgggaaatccaattcacgaaacgatgagatgcttgatcctgaggcatctttctggggggaagaaaaaagagcatcacatacaacaccagtactgatggaaaaaccatactat

SEQ ID NO: 6 - DNA, 1725 bp, Plasmodium falciparum
  source 1..1725: mol_type = genomic DNA
atgaatcatcttgggaatgttaaatatttagtcattgtgtttttgattttctttgatttgtttctagttaatggtagagatgtgcaaaacaatatagtggatgaaataaaatatcgtgaagaagtatgtaatgatgaggtagatctttaccttctaatggattgttctggaagtatacgtcgtcataattgggtgaaccatgcagtacctctagctatgaaattgatacaacaattaaatcttaatgataatgcaattcacttatatgctagtgttttttcaaacaatgcaagagaaattattagattacatagtgatgcatctaaaaacaaagagaaggctttaattattataaagtcactcttaagtacaaatcttccatatggtaaaacaaacttaactgatgcactgttacaagtaagaaaacatttaaatgaccgaatcaatagagagaatgctaatcaattagttgttatattaacagatggaattccagatagtattcaagattcattaaaagaatcaagaaaattaagtgatcgtggtgttaaaatagctgtttttggtattggacaaggtattaatgtagctttcaacagatttcttgtaggttgtcatccatcagatggtaaatgtaacttgtatgctgattctgcatgggaaaatgtaaaaaatgttatcggaccctttatgaaggctgtttgtgttgaagtagaaaaaacagcaagttgtggtgtttgggacgaatggtctccatgtagtgtaacttgtggtaaaggtaccaggtcaagaaaaagagaaatcttacacgaaggatgtacaagtgaattacaagaacaatgtgaagaagaaagatgtcttccaaaacgggaaccattagatgttccagatgaacccgaagatgatcaacctagaccaagaggagataattttgctgtcgaaaaaccaaacgaaaatataatagataataatccacaagaaccttcaccaaatccagaagaaggaaagggtgaaaatccaaacggatttgatttagatgaaaatccagaaaatccaccaaatccaccaaatccaccaaatccaccaaatccaccaaatccaccaaatccagatattcctgaacaagaaccaaatatacctgaagattcagaaaaagaagtaccttctgatgttccaaaaaatccagaagacgatcgagaagaaaactttgatattccaaagaaacccgaaaataagcacgataatcaaaataatttaccaaatgataaaagtgatagatatattccatattcaccattatctccaaaagttttggataatgaaaggaaacaaagtgacccccaaagtcaagataataatggaaataggcacgtacctaatagtgaagatagagaaacacgtccacatggtagaaataatgaaaatagatcatacaatagaaaacataacaatactccaaaacatcctgaaagggaagaacatgaaaagccagataataataaaaaaaaagcaggatcagataataaatataaaattgcaggtggaatagctggaggattagctttactcgcatgtgctggacttgcttataaattcgtagtaccaggagcagcaacaccctatgccggagaacctgcaccttttgatgaaacattaggtgaagaagataaagatttggacgaacctgaacaattcagattacctgaagaaaacgagtggaattaa

SEQ ID NO: 7 - RNA, 1215 nt, Plasmodium falciparum
  source 1..1215: mol_type = genomic RNA
atgatgagaaaattagctattttatctgtttcttcctttttatttgttgaggccttattccaggaataccagtgctatggaagttcgtcaaacacaagggttctaaatgaattaaattatgataatgcaggcactaatttatataatgaattagaaatgaattattatgggaaacaggaaaattggtatagtcttaaaaaaaatagtagatcacttggagaaaatgatgatggaaataacgaagacaacgagaaattaaggaaaccaaaacataaaaaattaaagcaaccagcggatggtaatcctgatccaaatgcaaacccaaatgtagatcccaatgccaacccaaatgtagatccaaatgcaaacccaaatgtagatccaaatgcaaacccaaatgcaaacccaaatgcaaacccaaatgcaaacccaaatgcaaacccaaatgcaaacccaaatgcaaacccaaatgcaaacccaaatgcaaacccaaatgcaaacccaaatgcaaacccaaatgcaaacccaaatgcaaacccaaatgcaaacccaaatgcaaacccaaatgcaaaccccaatgcaaatcctaatgcaaacccaaatgcaaacccaaacgtagatcctaatgcaaatccaaatgcaaacccaaacgcaaaccccaatgcaaatcctaatgcaaaccccaatgcaaatcctaatgcaaatcctaatgccaatccaaatgcaaatccaaatgcaaacccaaacgcaaaccccaatgcaaatcctaatgccaatccaaatgcaaatccaaatgcaaacccaaatgcaaacccaaatgcaaaccccaatgcaaatcctaataaaaacaatcaaggtaatggacaaggtcacaatatgccaaatgacccaaaccgaaatgtagatgaaaatgctaatgccaacagtgctgtaaaaaataataataacgaagaaccaagtgataagcacataaaagaatatttaaacaaaatacaaaattctctttcaactgaatggtccccatgtagtgtaacttgtggaaatggtattcaagttagaataaagcctggctctgctaataaacctaaagacgaattagattatgcaaatgatattgaaaaaaaaatttgtaaaatggaaaaatgttccagtgtgtttaatgtcgtaaatagttcaataggattaataatggtattatccttcttgttccttaat

SEQ ID NO: 8 - RNA, 1230 nt, Plasmodium falciparum
  source 1..1230: mol_type = genomic RNA
atgtggtggcgcctgtggtggctgctgctgctgctgctgctgctgtggcccatggtgtgggccgaggccttattccaggaataccagtgctatggaagttcgtcaaacacaagggttctaaatgaattaaattatgataatgcaggcactaatttatataatgaattagaaatgaattattatgggaaacaggaaaattggtatagtcttaaaaaaaatagtagatcacttggagaaaatgatgatggaaataacgaagacaacgagaaattaaggaaaccaaaacataaaaaattaaagcaaccagcggatggtaatcctgatccaaatgcaaacccaaatgtagatcccaatgccaacccaaatgtagatccaaatgcaaacccaaatgtagatccaaatgcaaacccaaatgcaaacccaaatgcaaacccaaatgcaaacccaaatgcaaacccaaatgcaaacccaaatgcaaacccaaatgcaaacccaaatgcaaacccaaatgcaaacccaaatgcaaacccaaatgcaaacccaaatgcaaacccaaatgcaaacccaaatgcaaacccaaatgcaaaccccaatgcaaatcctaatgcaaacccaaatgcaaacccaaacgtagatcctaatgcaaatccaaatgcaaacccaaacgcaaaccccaatgcaaatcctaatgcaaaccccaatgcaaatcctaatgcaaatcctaatgccaatccaaatgcaaatccaaatgcaaacccaaacgcaaaccccaatgcaaatcctaatgccaatccaaatgcaaatccaaatgcaaacccaaatgcaaacccaaatgcaaaccccaatgcaaatcctaataaaaacaatcaaggtaatggacaaggtcacaatatgccaaatgacccaaaccgaaatgtagatgaaaatgctaatgccaacagtgctgtaaaaaataataataacgaagaaccaagtgataagcacataaaagaatatttaaacaaaatacaaaattctctttcaactgaatggtccccatgtagtgtaacttgtggaaatggtattcaagttagaataaagcctggctctgctaataaacctaaagacgaattagattatgcaaatgatattgaaaaaaaaatttgtaaaatggaaaaatgttccagtgtgtttaatgtcgtaaatagttcaataggattaataatggtattatccttcttgttccttaat

SEQ ID NO: 9 - RNA, 3486 nt, Plasmodium falciparum
  source 1..3486: mol_type = genomic RNA
atgaaacatattttgtacatatcattttactttatccttgttaatttattgatatttcatataaatggaaagataataaagaattctgaaaaagatgaaatcataaaatctaacttgagaagtggttcttcaaattctaggaatcgaataaatgaggaaaagcacgagaagaaacacgttttatctcataattcatatgagaaaactaaaaataatgaaaataataaatttttcgataaggataaagagttaacgatgtctaatgtaaaaaatgtgtcacaaacaaatttcaaaagtcttttaagaaatcttggtgtttcagagaatatattccttaaagaaaataaattaaataaggaagggaaattaattgaacacataataaatgatgatgacgataaaaaaaaatatattaaagggcaagacgaaaacagacaagaagatcttgaacaagagagacttgctaaagaaaagttacaggggcaacaaagcgatttagaacaagagagacttgctaaagaaaagttgcaagaacaacaaagcgatttagaacaagagagacttgctaaagaaaagttgcaagaacaacaaagcgatttagaacaagatagacttgctaaagaaaagttacaagagcaacaaagcgatttagaacaagagagacgtgctaaagaaaagttgcaagaacaacaaagcgatttagaacgaacgaagacttctaaagaaaagttacatgagcagcaaagcgatttagaacaagagagacgtgctaaagaaaagttgcaagaacaacaaagcgatttagaacaagagagacttgctaaagaaaagttgcaagagcaacaaagcgatttagaacaagagagacttgctaaagaaaagttgcaagaacaacaaagcgatttagaacaagagagacttgctaaagaaaagttacaagagcagcaaagcgatttagaacaagagagacttgctaaagaaaagttgcaagaacaacaaagcgatttagaacaagagagacttgctaaagaaaagttgcaagaacaacaaagcgatttagaacaagatagacttgctaaagaaaagttacaagagcaacaaagcgatttagaacaagagagacttgctaaagaaaagttgcaagaacaacaaagcgatttagaacaagagagacgtgctaaagaaaagttgcaagaacaacaaagcgatttagaacaagagagacgtgctaaagaaaagttgcaagaacaacaaagcgatttagaacaagagagacgtgctaaagaaaagttgcaagaacaacaaagcgatttagaacaagagagacgtgctaaagaaaagttgcaagaacaacaaagcgatttagaacaagagagacttgctaaagaaaagttgcaagaacaacaaagcgatttagaacaagagagacgtgctaaagaaaagttgcaagaacaacaaagcgatttagaacaagagagacttgctaaagaaaagttgcaagaacaacaaagcgatttagaacaagagagacgtgctaaagaaaagttgcaagaacaacaaagcgatttagaacaagagagacgtgctaaagaaaagttgcaagaacaacaaagcgatttagaacaagatagacttgctaaagaaaagttacaagagcaacaaagcgatttagaacaagagagacgtgctaaagaaaagttgcaagaacaacaaagcgatttagaacgaacgaaggcatctacagaaacgttgcatgagcagcaaagcgatcttgaacaagagagacttgctaaagaaaagttacaagagcagcaaagcgatttagaacaagagagacttgctaaagaaaagttacaagagcaacaaagcgatttagaacgaacgaaggcatctacagaaacgttgcgtgagcagcaaagcgatcttgaacaagagaaactagctaaagaaaagttacaggggcaacaaagcgatcttgaacaagagagactagctaaagaaaagttacaggggcaacaaagcgatcttgaacaagagagactagctaaagaaaagttacaggggcaacaaagcgatcttgaacaagagagactagctaaagaaaagttacaggggcaacaaagcgatttagaacaagagagacttgctaaagaaaagttgcaagagcgacaaagcgatttagaacaagagagacttgctaaagaaaagttgcaagaacaacaaagcgatttagaacaagagagactagctaaagaaaagttgcaagaacaacaaagcgatttagaacaagacagacttgctaaagaaaagttgcaagaacaacaaagcgatttagaacaagagagactagctaaggaaaagttacaggggcagcatagcgatttagaacgaacgaaggcatctaaagaaacgttgcaagaacaacaaagcgatttagaacaagagagacttgctaaagaaaagttgcaagaacaacaaagcgatttagaacaagagagacgtgctaaagaaaagttgcaagaacaacaaagcgatttagaacaagagagacgtgctaaagaaaagttgcaagaacaacaaagcgatttagaacaagagagacgtgctaaagaaaagttgcaagagcagcaaagagatttagaacaaaggaaggctgatacgaaaaaaaatttagaaagaaaaaaggaacatggagatgtattagcagaggatttatatggtcgtttagaaataccagctatagaacttccatcagaaaatgaacgtggatattatataccacatcaatcttctttacctcaggacaacagagggaatagtagagattcgaaggaaatatctataatagaaaatacaaatagagaatctattacaacaaatgttgaaggacgaagggatatacataaaggacatcttgaagaaaagaaagatggttcaataaaaccagaacaaaaagaagataaatctgctgacatacaaaatcatacattagagacagtaaatatttctgatgttaatgattttcaaataagtaagtatgaggatgaaataagtgctgaatatgacgattcattaatagatgaagaagaagatgatgaagacttagacgaatttaagcctattgtgcaatatgacaatttccaagatgaagaaaacataggaatttataaagaactagaagatttgatagagaaaaatgaaaatttagatgatttagatgaaggaatagaaaaatcatcagaagaattatctgaagaaaaaataaaaaaaggaaagaaatatgaaaaaacaaaggataataattttaaaccaaatgataaaagtttgtatgatgagcatattaaaaaatataaaaatgataagcaggttaataaggaaaaggaaaaattcataaaatcattgtttcatatatttgacggagacaatgaaattttacagatcgtggatgagttatctgaagatataactaaatattttatgaaacta

SEQ ID NO: 10 - RNA, 5160 nt, Plasmodium falciparum
  source 1..5160: mol_type = genomic RNA
atgaagatcatattctttttatgttcatttcttttttttattataaatacacaatgtgtaacacatgaaagttatcaagaacttgtcaaaaaactagaagctttagaagatgcagtattgacaggttatagtttatttcaaaaggaaaaaatggtattaaatgaagaagaaattactacaaaaggtgcaagtgctcaaagtggtgcaagtgctcaaagtggtgcaagtgctcaaagtggtgcaagtgctcaaagtggtgcaagtgctcaaagtggtgcaagtgctcaaagtggtacaagtggtccaagtggtccaagtggtacaagtccatcatctcgttcaaacactttacctcgttcaaatacttcatctggtgcaagccctccagctgatgcaagcgattcagatgctaaatcttacgctgatttaaaacacagagtacgaaattacttgttcactattaaagaactcaaatatcccgaactctttgatttaaccaatcatatgttaactttgtgtgataatattcatggtttcaaatatttaattgatggatatgaagaaattaatgaattattatataaattaaacttttattttgatttattaagagcaaaattaaatgatgtatgtgctaatgattattgtcaaatacctttcaatcttaaaattcgtgcaaatgaattagacgtacttaaaaaacttgtgttcggatatagaaaaccattagacaatattaaagataatgtaggaaaaatggaagattacattaaaaaaaataaaacaaccatagcaaatataaatgaattaattgaaggaagtaagaaaacaattgatcaaaataagaatgcagataatgaagaagggaaaaaaaaattataccaagctcaatatgatctttctatttacaataaacaattagaagaagcacataatttaataagcgttttagaaaaacgtattgacactttaaaaaaaaatgaaaacataaagaaattacttgataagataaatgaaattaaaaatcccccaccggccaattctggaaatacaccaaatactctccttgataagaacaaaaaaatcgaggaacacgaagaaaaaataaaagaaattgccaaaactattaaatttaacattgatagtttatttactgatccacttgaattagaatattatttaagagaaaaaaataaaaaagttgatgtaacacctaaatcacaagatcctacgaaatctgttcaaataccaaaagttccttatccaaatggtattgtatatcctttaccactcactgatattcataattcattagctgcagataatgataaaaattcatatggtgatttaatgaatcctcatactaaagaaaaaattaatgaaaaaattattacagataataaggaaagaaaaatattcattaataacattaaaaaaaaaattgatttagaagaaaaaaacattaatcacacaaaagaacaaaataaaaaattacttgaagattatgaaaagtcaaaaaaggattatgaagaattacttgaaaaattttatgaaatgaaatttaataataattttaacaaagatgtcgtagataaaatattcagtgcaagatatacatataatgttgaaaaacaaagatataataataaattttcatcctctaataattctgtatataatgttcaaaaattaaaaaaggctctttcatatcttgaagattattctttaagaaaaggaatttctgaaaaagattttaatcattattatactttgaaaactggcctcgaagctgatataaaaaaattaacagaagaaataaagagtagtgaaaacaaaattcttgaaaaaaattttaaaggactaacacattcagcaaatggttccttagaagtatctgatattgtaaaattacaagtacaaaaagttttattaattaaaaaaatagaagacttaagaaagatagaattatttttaaaaaatgcacaactaaaagatagtattcatgtaccaaatatttataaaccacaaaataaaccagaaccatattatttaattgtattaaaaaaagaagtagataaattaaaagaatttataccaaaagtaaaagacatgttaaagaaagaacaagctgtcttatcaagtattacacaacctttagttgcagcaagcgaaacaactgaagatgggggtcactccacacacacattatcccaatcaggagaaacagaagtaacagaagaaacagaagaaacagaagaaacagtaggacacacaacaacggtaacaataacattaccaccaacacaaccatcaccaccaaaagaagtaaaagttgttgaaaattcaatagaacataagagtaatgacaattcacaagccttgacaaaaacagtttatctaaagaaattagatgaatttttaactaaatcatatatatgtcataaatatattttagtatcaaactctagtatggaccaaaaattattagaggtatataatcttactccagaagaagaaaatgaattaaaatcatgtgatccattagatttattatttaatattcaaaataacatacctgctatgtattcattatatgatagtatgaacaatgatttacaacatctcttttttgaattatatcaaaaggaaatgatttattatttacataaactaaaagaggaaaatcacatcaaaaaattattagaggagcaaaaacaaataactggaacatcatctacatccagtcctggaaatacaaccgtaaatactgctcaatccgcaactcacagtaattcccaaaaccaacaatcaaatgcatcctctaccaatacccaaaatggtgtagctgtatcatctggtcctgctgtagttgaagaaagtcatgatcccttaacagtattgtctattagtaacgatttgaaaggtattgttagtctcttaaatcttggaaataaaactaaagtacctaatccattaaccatttctacaacagagatggaaaaattttatgagaatattttaaaaaataatgatacctattttaatgatgatatcaaacaattcgtaaaatctaattcaaaagtaattacaggtttgaccgaaacacaaaaaaatgcattaaatgatgaaattaaaaaattaaaagatactttacagttatcatttgatttatataataaatataaattaaaattagatagattatttaataagaaaaaagaacttggccaagacaaaatgcaaattaaaaaacttactttattaaaagaacaattagaatcaaaattgaattcacttaataacccacataatgtattacaaaacttttctgttttctttaacaaaaaaaaagaagctgaaatagcagaaactgaaaacacattagaaaacacaaaaatattattgaaacattataaaggacttgttaaatattataatggtgaatcatctccattaaaaactttaagtgaagtatcaattcaaacagaagataattatgccaatttagaaaaatttagagtattaagtaaaatagatggaaaactcaatgataatttacatttaggaaagaaaaaattatctttcttatcaagtggattacatcatttaattactgaattaaaagaagtaataaaaaataaaaattatacaggtaattctccaagtgaaaataataagaaagttaacgaagctttaaaatcttacgaaaattttctcccagaagcaaaagttacaacagttgtaactccacctcaaccagatgtaactccatctccattatctgtaagggtaagtggtagttcaggatccacaaaagaagaaacacaaataccaacttcaggctctttattaacagaattacaacaagtagtacaattacaaaattatgacgaagaagatgattccttagttgtattacccatttttggagaatccgaagataatgacgaatatttagatcaagtagtaactggagaagcaatatctgtcacaatggataatatcctctcaggatttgaaaatgaatatgatgttatatatttaaaacctttagctggagtatatagaagcttaaaaaaacaaattgaaaaaaacatttttacatttaatttaaatttgaacgatatcttaaattcacgtcttaagaaacgaaaatatttcttagatgtattagaatctgatttaatgcaatttaaacatatatcctcaaatgaatacattattgaagattcatttaaattattgaattcagaacaaaaaaacacacttttaaaaagttacaaatatataaaagaatcagtagaaaatgatattaaatttgcacaggaaggtataagttattatgaaaaggttttagcgaaatataaggatgatttagaatcaattaaaaaagttatcaaagaagaaaaggagaagttcccatcatcaccaccaacaacacctccgtcaccagcaaaaacagacgaacaaaagaaggaaagtaagttccttccatttttaacaaacattgagaccttatacaataacttagttaataaaattgacgattacttaattaacttaaaggcaaagattaacgattgtaatgttgaaaaagatgaagcacatgttaaaataactaaacttagtgatttaaaagcaattgatgacaaaatagatctttttaaaaacccttacgacttcgaagcaattaaaaaattgataaatgatgatacgaaaaaagatatgcttggcaaattacttagtacaggattagttcaaaattttcctaatacaataatatcaaaattaattgaaggaaaattccaagatatgttaaacatttcacaacaccaatgcgtaaaaaaacaatgtccagaaaattctggatgtttcagacatttagatgaaagagaagaatgtaaatgtttattaaattacaaacaagaaggtgataaatgtgttgaaaatccaaatcctacttgtaacgaaaataatggtggatgtgatgcagatgccacatgtaccgaagaagattcaggtagcagcagaaagaaaatcacatgtgaatgtactaaacctgattcttatccacttttcgatggtattttctgcagttcctctaacttcttaggaatatcattcttattaatactcatgttaatattatacagtttcatt

SEQ ID NO: 11 - RNA, 1866 nt, Plasmodium falciparum
  source 1..1866: mol_type = genomic RNA
atgagaaaattatactgcgtattattattgagcgcctttgagtttacatatatgataaactttggaagaggacagaattattgggaacatccatatcaaaatagtgatgtgtatcgtccaatcaacgaacatagggaacatccaaaagaatacgaatatccattacaccaggaacatacataccaacaagaagattcaggagaagacgaaaatacattacaacacgcatatccaatagaccacgaaggtgctgaacccgcaccacaagaacaaaacttattctcaagcattgaaatagtcgaacggtcgaattatatgggtaatccgtggacggaatacatggcaaaatatgatattgaagaagttcatggttcaggtataagggtagatttaggagaggatgctgaagtagctggaactcaatacagacttccatcaggtaaatgtccagtattcggtaaaggtataattattgagaattcaaatactacttttctaacaccggtagctacaggaaatcaatatctaaaagatggagggtttgcgtttcctccaacagaacctcttatgtcaccaatgacactagatgaaatgagacatttttataaggataataaatacgtaaaaaacctcgacgaattgactttatgttcaagacatgcagggaatatgattccagataatgataaaaactcaaattataaatacccggctgtttatgatgataaagataaaaagtgtcatatcctgtatattgcagctcaagaaaataatggtcctagatattgtaataaagacgaaagtaaaagaaacagcatgttttgtttcagaccagcaaaagacataagcttccaaaactatacttacttgtctaaaaatgtagttgataactgggaaaaagtctgccctagaaagaatttacagaatgcgaaattcggactatgggtcgatggtaactgtgaagatataccacatgtaaatgaatttccagcaatagatcttttcgaatgcaataaactggtttttgaattgagtgcctcggatcagccaaaacagtatgaacaacatttaacagattacgaaaaaatcaaagaaggttttaaaaataaaaatgctagtatgatcaagagtgcttttcttcccacgggtgcttttaaggcagatcgttataaaagtcacggtaaaggatataattggggtaactataacacagagacacaaaagtgtgaaatttttaatgttaaaccaacatgtctcataaacaattcctcatacattgctaccactgctttatcccatcccatcgaagtagagaacaattttccttgtagcctatacaaagatgaaataatgaaagaaatcgagagagaatcaaaacgaattaaattaaatgataacgatgacgaggggaacaaaaaaattatagctccacgcatttttatttcagacgataaagactcgttaaaatgcccatgtgaccctgaaatggtcagtaacagtacatgccgcttctttgtatgtaaatgtgtagaaaggagggcagaagtaacatcaaataacgaggttgtagtaaaagaagaatacaaagatgagtacgcagatattcccgaacacaaaccaacctatgataagatgaaaataataatagcatcatcagctgcagttgctgtactagcgacgattttaatggtttatctttataaaagaaagggaaatgctgaaaaatatgataaaatggatgaaccgcaagattatgggaaatccaattcacgaaacgatgagatgcttgatcctgaggcatctttctggggggaagaaaaaagagcatcacatacaacaccagtactgatggaaaaaccatactat

SEQ ID NO: 12 - RNA, 1725 nt, Plasmodium falciparum
  source 1..1725: mol_type = genomic RNA
atgaatcatcttgggaatgttaaatatttagtcattgtgtttttgattttctttgatttgtttctagttaatggtagagatgtgcaaaacaatatagtggatgaaataaaatatcgtgaagaagtatgtaatgatgaggtagatctttaccttctaatggattgttctggaagtatacgtcgtcataattgggtgaaccatgcagtacctctagctatgaaattgatacaacaattaaatcttaatgataatgcaattcacttatatgctagtgttttttcaaacaatgcaagagaaattattagattacatagtgatgcatctaaaaacaaagagaaggctttaattattataaagtcactcttaagtacaaatcttccatatggtaaaacaaacttaactgatgcactgttacaagtaagaaaacatttaaatgaccgaatcaatagagagaatgctaatcaattagttgttatattaacagatggaattccagatagtattcaagattcattaaaagaatcaagaaaattaagtgatcgtggtgttaaaatagctgtttttggtattggacaaggtattaatgtagctttcaacagatttcttgtaggttgtcatccatcagatggtaaatgtaacttgtatgctgattctgcatgggaaaatgtaaaaaatgttatcggaccctttatgaaggctgtttgtgttgaagtagaaaaaacagcaagttgtggtgtttgggacgaatggtctccatgtagtgtaacttgtggtaaaggtaccaggtcaagaaaaagagaaatcttacacgaaggatgtacaagtgaattacaagaacaatgtgaagaagaaagatgtcttccaaaacgggaaccattagatgttccagatgaacccgaagatgatcaacctagaccaagaggagataattttgctgtcgaaaaaccaaacgaaaatataatagataataatccacaagaaccttcaccaaatccagaagaaggaaagggtgaaaatccaaacggatttgatttagatgaaaatccagaaaatccaccaaatccaccaaatccaccaaatccaccaaatccaccaaatccaccaaatccagatattcctgaacaagaaccaaatatacctgaagattcagaaaaagaagtaccttctgatgttccaaaaaatccagaagacgatcgagaagaaaactttgatattccaaagaaacccgaaaataagcacgataatcaaaataatttaccaaatgataaaagtgatagatatattccatattcaccattatctccaaaagttttggataatgaaaggaaacaaagtgacccccaaagtcaagataataatggaaataggcacgtacctaatagtgaagatagagaaacacgtccacatggtagaaataatgaaaatagatcatacaatagaaaacataacaatactccaaaacatcctgaaagggaagaacatgaaaagccagataataataaaaaaaaagcaggatcagataataaatataaaattgcaggtggaatagctggaggattagctttactcgcatgtgctggacttgcttataaattcgtagtaccaggagcagcaacaccctatgccggagaacctgcaccttttgatgaaacattaggtgaagaagataaagatttggacgaacctgaacaattcagattacctgaagaaaacgagtggaattaa

SEQ ID NO: 13 - protein, 579 aa, Plasmodium falciparum
MNHLGNVKYLVIVFLIFFDLFLVNGRDVQNNIVDEIKYREEVCNDEVDLYLLMDCSGSIRRHNWVNHAVPLAMKLIQQLNLNDNAIHLYASINVFSNNAREIIRLHSDASKNKEKALIIIKSLLSTNLPYGKTNLTDALLQVRKHLNDRINRENANQLVVILTDGIPDSIQDSLKESRKLSDRGVKIAVFGIGQGINVAFNRFLVGCHPSDGKCNLYADSAWENVKNVIGPFMKAVCVEVEKTASCGVWDEWSPCSINVTCGKGTRSRKREILHEGCTSELQEQCEEEVRCLPKREPLDVPDEPEDDQPRPRGDNFAVEKPNENIIDNNPQEPSPNPEEGKGENPNGFDLDENPENPPNPPNPPNPPNPPNPPNPDIPEQEPNIPEDSEKEVPSDVPKNPEDDREENFDIPKKPENKHDNQNNLPNDKSDRYIPYSPLSPKVLDNERKQSDPQSQDNNGNRHVPNSEDRETRPHGRNNENRSYNRKHNNTPKHPEREEHEKPDNNKKKAGSDNKYKIAGGIAGGLALLACAGLAYKFVVPGAATPYAGEPAPFDETLGEEDKDLDEPEQFRLPEENEWN

SEQ ID NO: 14 - protein, 622 aa, Plasmodium falciparum
MRKLYCVLLLSAFEFTYMINFGRGQNYWEHPYQNSDVYRPINEHREHPKEYEYPLHQEHTYQQEDSGEDENTLQHAYPIDHEGAEPAPQEQNLFSSIEIVERSNYMGNPWTEYMAKYDIEEVHGSGIRVDLGEDAEVAGTQYRLPSGKCPVFGKGIIIENSNTTFLTPVATGNQYLKDGGFAFPPTEPLMSPMTLDEMRHFYKDNKYVKNLDELTLCSRHAGNMIPDNDKNSNYKYPAVYDDKDKKCHILYIAAQENNGPRYCNKDESKRNSMFCFRPAKDISFQNYTYLSKNVVDNWEKVCPRKNLQNAKFGLWVDGNCEDIPHVNEFPAIDLFECNKLVFELSASDQPKQYEQHLTDYEKIKEGFKNKNASMIKSAFLPTGAFKADRYKSHGKGYNWGNYNTETQKCEIFNVKPTCLINNSSYIATTALSHPIEVENNFPCSLYKDEIMKEIERESKRIKLNDNDDEGNKKIIAPRIFISDDKDSLKCPCDPEMVSNSTCRFFVCKCVERRAEVTSNNEVVVKEEYKDEYADIPEHKPTYDKMKIIIASSAAVAVLATILMVYLYKRKGNAEKYDKMDEPQDYGKSNSRNDEMLDPEASFWGEEKRASHTTPVLMEKPYY

SEQ ID NO: 15 - protein, 1736 aa, Plasmodium falciparum
MKIIFFLCSFLFFIINTQCVTHESYQELVKKLEALEDAVLTGYSLFQKEKMVLNEEEVITTKGASAQSGASAQSGASAQSGASAQSGASAQSGASAQSGTSGPSGPSGTSPSSRSNTLPRSNTSSGASPPADASDSDAKSYADLKHRVRNYLFTIKELKYPELFDLTNHMLTLCDNIHGFKYLIDGYEEINELLYKLNFYFDLLRAKLNDVCANDYCQIPFNLKIRANELDVLKKLVFGYRKPLDNIKDNVGKMEDYIKKNKTTIANINELIEGSKKTIDQNKNADNEEGKKKLYQAQYDLSIYNKQLEEAHNLISINVLEKRIDTLKKNENIKKLLDKINEIKNPPPANSGNTPNTLLDKNKKIEEHEEKIKEIAKTIKFNIDSLFTDPLELEYYLREKNKKVDVTPKSQDPTKSINVQIPKVPYPNGIVYPLPLTDIHNSLAADNDKNSYGDLMNPHTKEKINEKIITDNKERKIFINNIKKKIDLEEKNINHTKEQNKKLLEDYEKSKKDYEELLEKFYEMKFNNNFNKDVVDKIFSARYTYNVEKQRYNNKFSSSNNSINVYNVQKLKKALSYLEDYSLRKGISEKDFNHYYTLKTGLEADIKKLTEEIKSSENKILEKNFKGLTHSANGSLEVSDIVKLQVQKVLLIKKIEDLRKIELFLKNAQLKDSIHVPNIYKPQNKPEPYYLIVLKKEVDKLKEFIPKVKDMLKKEQAVLSSITQPLVAASETTEDGGHSTHTLSQSGETEVTEETEETEETVGHTTTVTITLPPTQPSPPKEVKVVENSIEHKSNDNSQALTKTVYLKKLDEFLTKSYICHKYILVSNSSMDQKLLEVYNLTPEEEVNELKSCDPLDLLFNIQNNIPAMYSLYDSMNNDLQHLFFELYQKEMIYYLHKLKEENHIKKLLEEQKQITGTSSTSSPGNTTVNTAQSATHSNSQNQQSNASSTNTQNGVAVSSGPAVVEESHDPLTVLSISNDLKGIVSLLNLGNKTKVPNPLTISTTEMEKFYENILKNNDTYFNDDIKQFVKSNSKVITGLTETQKNALNDEIKKLKDTLQLSFDLYNKYKLKLDRLFNKKKELGQDKMQIKKLTLLKEQLESKLNSLNNPHNVLQNFSINVFFNKKKEAEIAETENTLENTKILLKHYKGLVKYYNGESSPLKTLSEVSIQTEDNYANLEKFRVLSKIDGKLNDNLHLGKKKLSFLSSGLHHLITELKEVIKNKNYTGNSPSENNKKVNEALKSYENFLPEAKVTTVVTPPQPDVTPSPLSINVRVSGSSGSTKEETQIPTSGSLLTELQQVVQLQNYDEEDDSLVVLPIFGESEDNDEYLDQVVTGEAISINVTMDNILSGFENEYDVIYLKPLAGVYRSLKKQIEKNIFTFNLNLNDILNSRLKKRKYFLDVLESDLMQFKHISSNEYIIEDSFKLLNSEQKNTLLKSYKYIKESINVENDIKFAQEGISYYEKVLAKYKDDLESIKKVIKEEKEKFPSSPPTTPPSPAKTDEQKKESKFLPFLTNIETLYNNLVNKIDDYLINLKAKINDCNVEKDEAHVKITKLSDLKAIDDKIDLFKNPYDFEAIKKLINDDTKKDMLGKLLSTGLVQNFPNTIISKLIEGKFQDMLNISQHQCVKKQCPENSGCFRHLDEREECKCLLNYKQEGDKCVENPNPTCNENNGGCDADATCTEEDSGSSRKKITCECTKPDSYPLFDGIFCSSSNFLGISFLLILMLILYSFI

SEQ ID NO: 16 - protein, 520 aa, Plasmodium falciparum
MKHILYISFYFILVNLLIFQINGKILKKSENDEIIKSNLRSGSSNSLNQIYEEKHEKKHALSHNSYDKTKNNENHKFFDKDKEVSISNLKNVSQTNVKNALRNFGVSENIFLQENKLGEEGKLINHITNDDENKEKYIKGEEEVNREEDPEEKAARERQEAEEKAARERQEAEEKAAREKQEAEEKAARERQVAEKAAREKQEAEEKAAREKQEAEEKAAREREESPKRALAEQRAAFERIDSMKQKLEGGKEHGDVLAEDLYGRLEIPVIELPSENEGGYYIQHQSSLPQDNRGNSRDSKEISIIEKTNRESITTNVEGRRDIHKGHLEEKKDVSIKPEQKEDKSADVQNHALETVNILDVKDFQISEYEDEISAEYDDSLIDEEEVDDEDLDQFKPIVQYDNFQDEENIGIYKELEDLIEKNENLDDLDEGIEKSSEELSEEKKKKGKKYEKTKDTNFKPNDKSLYDEHIKKYKNVKQINKEKEKFIKSLFHIFDGDNEILQIVDELSEDITKYFMKL

SEQ ID NO: 17 - protein, 403 aa, Plasmodium falciparum
MMRKLAILSINVSSFLFVEALFQEYQCYGSSSNTRVLNELNYDNAGTNLYNELEMNYYGKQENWYSLKKNSRSLGENDDGNNEDNEKLRKPKHKKLKQPADGNPDPNANPNVDPNANPNVDPNANPNVDPNANPNANPNANPNANPNANPNANPNANPNANPNANPNANPNANPNANPNANPNANPNANPNANPNANPNVDPNANPNANPNANPNANPNANPNANPNANPNANPNANPNANPNANPNANPNANPNANPNANPNANPNANPNANPNKNNQGNGQGHNMPNDPNRNVDENANANSAVKNNNNEEPSDKHIKEYLNKIQNSLSTEWSPCSINVTCGNGIQVRIKPGSANKPKDELDYANDIEKKICKMEKCSSINVFNVVNSSIGLIMVLSFLFLN

SEQ ID NO: 18 - DNA, 1572 bp, unidentified
  source 1..1572: mol_type = genomic DNA; note = Japanese encephalitis virus
atgcttggcagcaatagtggtcaacgtgtggtgttcactatcctcctgctgttggtcgctccggcttacagttttaactgtctgggaatggggaatcgagatttcatagaaggagccagtggagccacttgggtggatctggtattagaaggagacagttgtttgacaatcatggcaaacgacaaaccaacactagatgtccgcatgatcaacattgaagccagccaactcgctgaagttaggagctactgctatcacgcttcagtcactgacatttcaacggtggctcgatgccccacgactggagaagctcacaacgagaaacgtgctgacagcagctacgtgtgcaagcaaggctttactgaccgcggatggggaaatggatgtggacttttcgggaaaggaagcattgacacttgcgcaaagtttacttgtactaataaggccattggaagaacaatccaaccagagaacatcaagtatgaagttggtgtattcgtgcacggaaccaccacctcggaaaaccatgggaattactcagcgcaggttggagcgtctcaagcagcaaagtttactgtaactccaaacgctccctcaataaccctcaagcttggtgattatggagaagttacactggattgtgaaccaaggagtggactgaacactgaagcgttctatgtcatgactgtgggttcgaagtcattcttagtccatagggaatggttccatgacctttctcttccctggacatccccctcaagcacggcatggaggaacagagaactccttatggaatttgaagaggcacatgccacaaaacaatctgtcgtagcccttgggtcacaggagggaggcctccatcaagcgttagcaggagccatcgtggtggagtactcaagctcagtgaagttgacatcaggtcacctgaaatgcaggctgaaaatggacaaactggctctgaagggcacgacttatggcatgtgcacagaaaaattctcgttcgcgaaaaacccagcggacacaggccatggaacagttgtcattgagctcacatactctggaagcgatggtccctgcaaaattccgattgtttcagtcgcgagtttaaacgacatgacccctgtgggaaggctggtaacagtaaaccccttcgtcgcgacatccagctccaactcgaaggtgctggttgagatggaacctcctttcggagactcttatattgtggttggaagaggggacaagcagattaaccatcactggcacaaagctggaagcacgttgggcaaagccttctcaacaactttgaaaggagctcaaagactggcagcgctaggggacacagcctgggactttggttccattgggggggtactcaactccataggaaaagctgttcaccaagtatttggcggtgcatttagaacgctttttgggggaatgtcttggatcacgcaagggctaatgggggccctacttctctggatgggtgtcaacgcacgagatcggtcaatcgccttagcttttttggccacgggaggtgtgctcgtctttttagcgaccaacgtgcatgct

SEQ ID NO: 19 - DNA, 2046 bp, unidentified
  source 1..2046: mol_type = genomic DNA; note = Japanese encephalitis virus
atgtggcttgtcagcttggcaatcgtaacagcttgtgccggagctatgaagctatcaaactttcaaggaaagcttctgatgaccatcaacaacacggacattgcggacgtcatcgtgatccctacctcaaaaggcgaaaacagatgttgggtccgagcgatcgacgttggttacatgtgtgaagacaccattacgtacgaatgtccgaagctagcagtgggcaacgacccagaagacgtggattgctggtgcgacaatcaagaagtcttcgtgcagtatggtcgctgcacacggaccaggcattccaaacgaagcagaagatccgtttcggtccaaacgcatggtgaaagctcactagtgaacaaaaaagaggcttggctggattcaacgaaggccacgcgatacctcatgaaaacggagaattggatcataaggaaccctggttatgctttcctggcggcggcacttggttggatgcttggcagcaatagtggtcaacgtgtggtgttcactatcctcctgctgttggtcgctccggcttacagttttaactgtctgggaatggggaatcgagatttcatagaaggagccagtggagccacttgggtggatctggtattagaaggagacagttgtttgacaatcatggcaaacgacaaaccaacactagatgtccgcatgatcaacattgaagccagccaactcgctgaagttaggagctactgctatcacgcttcagtcactgacatttcaacggtggctcgatgccccacgactggagaagctcacaacgagaaacgtgctgacagcagctacgtgtgcaagcaaggctttactgaccgcggatggggaaatggatgtggacttttcgggaaaggaagcattgacacttgcgcaaagtttacttgtactaataaggccattggaagaacaatccaaccagagaacatcaagtatgaagttggtgtattcgtgcacggaaccaccacctcggaaaaccatgggaattactcagcgcaggttggagcgtctcaagcagcaaagtttactgtaactccaaacgctccctcaataaccctcaagcttggtgattatggagaagttacactggattgtgaaccaaggagtggactgaacactgaagcgttctatgtcatgactgtgggttcgaagtcattcttagtccatagggaatggttccatgacctttctcttccctggacatccccctcaagcacggcatggaggaacagagaactccttatggaatttgaagaggcacatgccacaaaacaatctgtcgtagcccttgggtcacaggagggaggcctccatcaagcgttagcaggagccatcgtggtggagtactcaagctcagtgaagttgacatcaggtcacctgaaatgcaggctgaaaatggacaaactggctctgaagggcacgacttatggcatgtgcacagaaaaattctcgttcgcgaaaaacccagcggacacaggccatggaacagttgtcattgagctcacatactctggaagcgatggtccctgcaaaattccgattgtttcagtcgcgagtttaaacgacatgacccctgtgggaaggctggtaacagtaaaccccttcgtcgcgacatccagctccaactcgaaggtgctggttgagatggaacctcctttcggagactcttatattgtggttggaagaggggacaagcagattaaccatcactggcacaaagctggaagcacgttgggcaaagccttctcaacaactttgaaaggagctcaaagactggcagcgctaggggacacagcctgggactttggttccattgggggggtactcaactccataggaaaagctgttcaccaagtatttggcggtgcatttagaacgctttttgggggaatgtcttggatcacgcaagggctaatgggggccctacttctctggatgggtgtcaacgcacgagatcggtcaatcgccttagcttttttggccacgggaggtgtgctcgtctttttagcgaccaacgtgcatgct

SEQ ID NO: 20 - RNA, 1572 nt, unidentified
  source 1..1572: mol_type = genomic RNA; note = Japanese encephalitis virus
atgcttggcagcaatagtggtcaacgtgtggtgttcactatcctcctgctgttggtcgctccggcttacagttttaactgtctgggaatggggaatcgagatttcatagaaggagccagtggagccacttgggtggatctggtattagaaggagacagttgtttgacaatcatggcaaacgacaaaccaacactagatgtccgcatgatcaacattgaagccagccaactcgctgaagttaggagctactgctatcacgcttcagtcactgacatttcaacggtggctcgatgccccacgactggagaagctcacaacgagaaacgtgctgacagcagctacgtgtgcaagcaaggctttactgaccgcggatggggaaatggatgtggacttttcgggaaaggaagcattgacacttgcgcaaagtttacttgtactaataaggccattggaagaacaatccaaccagagaacatcaagtatgaagttggtgtattcgtgcacggaaccaccacctcggaaaaccatgggaattactcagcgcaggttggagcgtctcaagcagcaaagtttactgtaactccaaacgctccctcaataaccctcaagcttggtgattatggagaagttacactggattgtgaaccaaggagtggactgaacactgaagcgttctatgtcatgactgtgggttcgaagtcattcttagtccatagggaatggttccatgacctttctcttccctggacatccccctcaagcacggcatggaggaacagagaactccttatggaatttgaagaggcacatgccacaaaacaatctgtcgtagcccttgggtcacaggagggaggcctccatcaagcgttagcaggagccatcgtggtggagtactcaagctcagtgaagttgacatcaggtcacctgaaatgcaggctgaaaatggacaaactggctctgaagggcacgacttatggcatgtgcacagaaaaattctcgttcgcgaaaaacccagcggacacaggccatggaacagttgtcattgagctcacatactctggaagcgatggtccctgcaaaattccgattgtttcagtcgcgagtttaaacgacatgacccctgtgggaaggctggtaacagtaaaccccttcgtcgcgacatccagctccaactcgaaggtgctggttgagatggaacctcctttcggagactcttatattgtggttggaagaggggacaagcagattaaccatcactggcacaaagctggaagcacgttgggcaaagccttctcaacaactttgaaaggagctcaaagactggcagcgctaggggacacagcctgggactttggttccattgggggggtactcaactccataggaaaagctgttcaccaagtatttggcggtgcatttagaacgctttttgggggaatgtcttggatcacgcaagggctaatgggggccctacttctctggatgggtgtcaacgcacgagatcggtcaatcgccttagcttttttggccacgggaggtgtgctcgtctttttagcgaccaacgtgcatgct

SEQ ID NO: 21 - RNA, 2046 nt, unidentified
  source 1..2046: mol_type = genomic RNA; note = Japanese encephalitis virus
atgtggcttgtcagcttggcaatcgtaacagcttgtgccggagctatgaagctatcaaactttcaaggaaagcttctgatgaccatcaacaacacggacattgcggacgtcatcgtgatccctacctcaaaaggcgaaaacagatgttgggtccgagcgatcgacgttggttacatgtgtgaagacaccattacgtacgaatgtccgaagctagcagtgggcaacgacccagaagacgtggattgctggtgcgacaatcaagaagtcttcgtgcagtatggtcgctgcacacggaccaggcattccaaacgaagcagaagatccgtttcggtccaaacgcatggtgaaagctcactagtgaacaaaaaagaggcttggctggattcaacgaaggccacgcgatacctcatgaaaacggagaattggatcataaggaaccctggttatgctttcctggcggcggcacttggttggatgcttggcagcaatagtggtcaacgtgtggtgttcactatcctcctgctgttggtcgctccggcttacagttttaactgtctgggaatggggaatcgagatttcatagaaggagccagtggagccacttgggtggatctggtattagaaggagacagttgtttgacaatcatggcaaacgacaaaccaacactagatgtccgcatgatcaacattgaagccagccaactcgctgaagttaggagctactgctatcacgcttcagtcactgacatttcaacggtggctcgatgccccacgactggagaagctcacaacgagaaacgtgctgacagcagctacgtgtgcaagcaaggctttactgaccgcggatggggaaatggatgtggacttttcgggaaaggaagcattgacacttgcgcaaagtttacttgtactaataaggccattggaagaacaatccaaccagagaacatcaagtatgaagttggtgtattcgtgcacggaaccaccacctcggaaaaccatgggaattactcagcgcaggttggagcgtctcaagcagcaaagtttactgtaactccaaacgctccctcaataaccctcaagcttggtgattatggagaagttacactggattgtgaaccaaggagtggactgaacactgaagcgttctatgtcatgactgtgggttcgaagtcattcttagtccatagggaatggttccatgacctttctcttccctggacatccccctcaagcacggcatggaggaacagagaactccttatggaatttgaagaggcacatgccacaaaacaatctgtcgtagcccttgggtcacaggagggaggcctccatcaagcgttagcaggagccatcgtggtggagtactcaagctcagtgaagttgacatcaggtcacctgaaatgcaggctgaaaatggacaaactggctctgaagggcacgacttatggcatgtgcacagaaaaattctcgttcgcgaaaaacccagcggacacaggccatggaacagttgtcattgagctcacatactctggaagcgatggtccctgcaaaattccgattgtttcagtcgcgagtttaaacgacatgacccctgtgggaaggctggtaacagtaaaccccttcgtcgcgacatccagctccaactcgaaggtgctggttgagatggaacctcctttcggagactcttatattgtggttggaagaggggacaagcagattaaccatcactggcacaaagctggaagcacgttgggcaaagccttctcaacaactttgaaaggagctcaaagactggcagcgctaggggacacagcctgggactttggttccattgggggggtactcaactccataggaaaagctgttcaccaagtatttggcggtgcatttagaacgctttttgggggaatgtcttggatcacgcaagggctaatgggggccctacttctctggatgggtgtcaacgcacgagatcggtcaatcgccttagcttttttggccacgggaggtgtgctcgtctttttagcgaccaacgtgcatgct

SEQ ID NO: 22 - protein, 532 aa, unidentified
  source 1..532: note = Japanese encephalitis virus
MLGSNSGQRVVFTILLLLVAPAYSFNCLGMGNRDFIEGASGATWVDLVLEGDSCLTIMANDKPTLDVRMINIEASQLAEVRSYCYHASINVTDISTVARCPTTGEAHNEKRADSSYVCKQGFTDRGWGNGCGLFGKGSIDTCAKFTCTNKAIGRTIQPENIKYEVGVFVHGTTTSENHGNYSAQVGASQAAKFTVTPNAPSITLKLGDYGEVTLDCEPRSGLNTEAFYVMTVGSKSFLVHREWFHDLSLPWTSPSSTAWRNRELLMEFEEAHATKQSINVVALGSQEGGLHQALAGAIVVEYSSSINVKLTSGHLKCRLKMDKLALKGTTYGMCTEKFSFAKNPADTGHGTVVIELTYSGSDGPCKIPIVSINVASLNDMTPVGRLVTVNPFVATSSSNSKVLVEMEPPFGDSYIVVGRGDKQINHHWHKAGSTLGKAFSTTLKGAQRLAALGDTAWDFGSIGGVLNSIGKAVHQVFGGAFRTLFGGMSWITQGLMGALLLWMGVNARDRSIALAFLATGGVLVFLATNVHA

SEQ ID NO: 23 - protein, 694 aa, unidentified
  source 1..694: note = Japanese encephalitis virus
MWLVSLAIVTACAGAMKLSNFQGKLLMTINNTDIADVIVIPTSKGENRCWVRAIDVGYMCEDTITYECPKLAVGNDPEDVDCWCDNQEVFVQYGRCTRTRHSKRSRRSINVSINVQTHGESSLVNKKEAWLDSTKATRYLMKTENWIIRNPGYAFLAAALGWMLGSNSGQRVVFTILLLLVAPAYSFNCLGMGNRDFIEGASGATWVDLVLEGDSCLTIMANDKPTLDVRMINIEASQLAEVRSYCYHASINVTDISTVARCPTTGEAHNEKRADSSYVCKQGFTDRGWGNGCGLFGKGSIDTCAKFTCTNKAIGRTIQPENIKYEVGVFVHGTTTSENHGNYSAQVGASQAAKFTVTPNAPSITLKLGDYGEVTLDCEPRSGLNTEAFYVMTVGSKSFLVHREWFHDLSLPWTSPSSTAWRNRELLMEFEEAHATKQSINVVALGSQEGGLHQALAGAIVVEYSSSINVKLTSGHLKCRLKMDKLALKGTTYGMCTEKFSFAKNPADTGHGTVVIELTYSGSDGPCKIPIVSINVASLNDMTPVGRLVTVNPFVATSSSNSKVLVEMEPPFGDSYIVVGRGDKQINHHWHKAGSTLGKAFSTTLKGAQRLAALGDTAWDFGSIGGVLNSIGKAVHQVFGGAFRTLFGGMSWITQGLMGALLLWMGVNARDRSIALAFLATGGVLVFLATNVHA

SEQ ID NO: 24 - protein, 825 aa, unidentified
  source 1..825: note = Japanese encephalitis virus
MTKKPGGPGKNRAINMLKRGLPRVFPLVGVKRVVMSLLDGRGPVRFVLALITFFKFTALAPTKALLGRWRAVEKSINVAMKHLTSFKRELGTLIDAVNKRGKKQNKRGGNESSIMWLVSLAIVTACAGAMKLSNFQGKLLMTINNTDIADVIVIPTSKGENRCWVRAIDVGYMCEDTITYECPKLAVGNDPEDVDCWCDNQEVFVQYGRCTRTRHSKRSRRSINVSINVQTHGESSLVNKKEAWLDSTKATRYLMKTENWIIRNPGYAFLAAALGWMLGSNSGQRVVFTILLLLVAPAYSFNCLGMGNRDFIEGASGATWVDLVLEGDSCLTIMANDKPTLDVRMINIEASQLAEVRSYCYHASINVTDISTVARCPTTGEAHNEKRADSSYVCKQGFTDRGWGNGCGLFGKGSIDTCAKFTCNNKAIGRTIQPENIKYEVGVFVHGTTTSENHGNYSAQVGASQAAKFTVTPNAPSITLKLGDYGEVTLDCEPRSGLNTEAFYVMTVGSKSFLVHREWFHDLSLPWTSPSSTAWRNRELLMEFEEAHATKQSINVVALGSQEGGLHQALAGAIVVEYSSSINVKLTSGHLKCRLKMDKLALKGTTYGMCTEKFSFAKNPADTGHGTVVIELTYSGSDGPCKIPIVSINVASLNDMTPVGRLVTVNPFVATSSSNSKVLVEMEPPFGDSYIVVGRGDKQINHHWHKAGSTLGKAFSTTLKGAQRLAALGDTAWDFGSIGGVLNSIGKAVHQVFGGAFRTLFGGMSWITQGLMGALLLWMGVNARDRSIALAFLATGGVLVFLATNVHADTGCAIDITRKEMRCGS

SEQ ID NO: 25 - protein, 3462 aa, unidentified
  source 1..3462: note = Japanese encephalitis virus
MTKKPGGPGKNRAINMLKRGLPRVFPLVGVKRVVMSLLDGRGPVRFVLALITFFKFTALAPTKALLGRWRAVEKSINVAMKHLTSFKRELGTLIDAVNKRGKKQNKRGGNESSIMWLASLAIVTACAGAMKLSNFQGKLLMTINNTDIADVIVIPTSKGENRCWVRAIDVGYMCEDTITYECPKLAVGNDPEDVDCWCDNQEVYVQYGRCTRTRHSKRSRRSINVSINVQTHGESSLVNKKEAWLDSTKATRYLMKTENWIIRNPGYAFLAAALGWMLGSNSGQRVVFTILLLLVAPAYSFNCLGMGNRDFIEGASGATWVDLVLEGDSCLTIMANDKPTLDVRMINIEASQLAEVRSYCYHASINVTDISTVARCPTTGEAHNEKRADSSYVCKQGFTDRGWGNGCGLFGKGSIDTCAKFSCTNKAIGRMIQPENIKYEVGIFVHGTTTSENHGNYSAQVGASQAAKFTVTPNAPSITLKLGDYGEVTLDCEPRSGLNTEAFYVMTVGSKSFLVHREWFHDLSLPWTSPSSTAWRNRELLMEFEEAHATKQSINVVALGSQEGGLHQALAGAIVVEYSSSINVKLTSGHLKCRLKMDKLALKGTTYGMCTEKFSFAKNPADTGHGTVVIELTYSGSDGPCKIPIVSINVASLNDMTPVGRLVTVNPFVATSSSNSKVLVEMEPPFGDSYIVVGRGDKQINHHWHKAGSTLGKAFSTTLKGAQRLAALGDTAWDFGSIGGVFNSIGKAVHQVFGGAFRTLFGGMSWITQGLMGALLLWMGVNARDRSIALAFLATGGVLVFLATNVHADTGCAIDITRKEMRCGSGIFVHNDVEAWVDRYKYLPETPRSLAKIVHKAHQEGVCGVRSINVTRLEHQMWESINVRDELNVLLKENAVDLSINVVVNKPVGRYRSAPKRLSMTQEKFEMGWKAWGKSILFAPELANSTFVVDGPETKECPDERRAWNSMQIEDFGFGITSTRVWLKIREENTDECDGAIIGTAVKGHVAVHSDLSYWIESRLNDTWKLERAVFGEVKSCTWPETHTLWGDGVEESELIIPHTIAGPRSKHNRREGYKTQNQGPWDENGIVLDFDYCPGTKVTITEDCGKRGPSIRTTTDSGKLITDWCCRSCSLPPLRFRTENGCWYGMEIRPVRHDETTLVRSQVDAFNGEMIDPFQLGLLVMFLATQEVLRKRWTARLTIPAVLGALLVLMLGGITYTDMARYVVLVAAAFAEANSGGDVLHLALIAVFKIQPSFLVMNMLSARWTNQENVVLVLGAAFFQLASINVDLQIGVHGILNAAAIAWMIVRAITFPTTSTVAMPVLALLTPGMRALYLDTYRIILLVIGICSLLQERRKTMAKKKGAVLLGLALTSTGWFSPTTIAAGLMVCNPNKKRGWPATEFLSAVGLMFAIVGGLAELDIESMSIPFMLAGLMAVSYVVSGKATDMWLDRAADISWEMEAAITGSSRRLDVKLDDDGDFHLIDDPGVPWKVWLLRMSCIGLAALTPWAIVPAAFGYWLTLKTTKRGGVFWDTPSPKPCLKGDTTTGVYRIMARGILGTYQAGVGVMYENVFHTLWHTTRGAAIMSGEGKLTPYWGSINVKEDRISYGGPWRFDRKWNGTDDVQVIVVEPGKPAVNIQTKPGVFRTPFGEIGAVSLDYPRGTSGSPILDSNGDIIGLYGNGVELGDGSYVSAIVQGDRQEEPVPDAYTPGMLKKRQMTVLDLHPGSGKTRKILPQIIKDAIQQRLRTAVLAPTRVVAAEMAEALKGLPVRYQTSAVQREHQGNEIVDVMCHATLTHRLMSPNRVPNYNLFVMDEAHFTDPASIAARGYIATKVELGEAAAIFMTATPPGTTDPFPDSNAPIHDLQDEIPDRAWSSGYEWITDYAGKTVWFVASINVKMGNEIAMCLQRAGKKVIQLNRKSYDTEYPKCKNGDWDFVITTDISEMGANFGASRVIDCRKSINVKPTILEEGEGRVILGNPSPITSASAAQRRGRVGRNPNQVGDEYHYGGATSEDDSNLAHWTEAKIMLDNIHMPNGLVAQLYGPEREKAFTMDGEYRLRGEEKKNFLELLRTADLPVWLAYKVASNGIQYTDRKWCFDGPRTNAILEDNTEVEIVTRMGERKILKPRWLDARVYADHQALKWFKDFAAGKRSAVSFIEVLGRMPEHFMGKTREALDTMYLVATAEKGGKAHRMALEELPDALETITLIVAITVMTGGFFLLMMQRKGIGKMGLGALVLTLATFFLWAAEVPGTKIAGTLLVALLLMVVLIPEPEKQRSQTDNQLAVFLICVLTVVGVVAANEYGMLEKTKADLKSMFGGRTQASGLTGLPSMALDLRPATAWALYGGSTVVLTPLLKHLITSEYVTTSLASISSQAGSLFVLPRGVPFTDLDLTVGLVFLGCWGQITLTTFLTAMVLVTLHYGYMLPGWQAEALRAAQRRTAAGIMKNAVVDGMVATDVPELERTTPLMQKKVGQVLLIGVSINVAAFLVNPNVTTVREAGVLVTAATLTLWDNGASAVWNSTTATGLCHVMRGSYLAGGSIAWTLIKNADKPSLKRGRPGGRTLGEQWKEKLNAMSRDEFFKYRREAIIEVDRTEARRARRENNIVGGHPVSRGSAKLRWLVEKGFVSPIGKVIDLGCGRGGWSYYAATLKKVQEVKGYTKGGAGHEEPMLMQSYGWNLVSLKSGVDVFYKPSEPSDTLFCDIGESSPSPEVEEQRTLRVLEMTSDWLHRGPREFCIKVLCPYMPKVIEKMEVLQRRFGGGLVRLPLSRNSNHEMYWVSGAAGNVVHAVNMTSQVLLGRMDRTVWRGPKYEEDVNLGSGTRAVGKGEVHSNQEKIRKRIQKLKEEFATTWHKDPEHPYRTWTYHGSYEVKATGSASSLVNGVVKLMSKPWDAIANVTTMAMTDTTPFGQQRVFKEKVDTKAPEPPAGVKEVLNETTNWLWAHLSREKRPRLCTKEEFIKKVNSNAALGAVFAEQNQWSTAREAVGDPLFWEMVNEERENHLRGECHTCIYNMMGKREKKPGEFGKAKGSRAIWFMWLGARYLEFEALGFLNEDHWLSRENSGGGVEGSGVQKLGYILRDIAGKQGGKMYADDTAGWDTRITRTDLENEAKVLELLDGEHRMLARAIIELTYRHKVVKVMRPAAGGKTVMDVISREDQRGSGQVVTYALNTFTNIAVQLVRLMEAEGVIGPQHLEQLPRKNKIAVRTWLFENGEERVTRMAISGDDCVVKPLDDRFATALHFLNAMSKVRKDIQEWKPSHGWHDWQQVPFCSNHFQEIVMKDGRSIVVPCRGQDELIGRARISPGAGWNVKDTACLAKAYAQMWLLLYFHRRDLRLMANAICSAVPVDWVPTGRTSWSIHSKGEWMTTEDMLQVWNRVWIEENEWMMDKTPITSWTDVPYVGKREDIWCGSLIGTRSRATWAENVYAAINQVRAIIGKENYVDYMTSLRRYEDVLIQEDRVI

SEQ ID NO: 26 - protein, 3462 aa, unidentified
  source 1..3462: note = Japanese encephalitis virus
MTKKPGGPGKNRAINMLKRGLPRVFPLVGVKRVVMSLLDGRGPVRFVLALITFFKFTALAPTKALLGRWRAVEKSINVAMKHLTSFKRELGTLIDAVNKRGKKQNKRGGNESSIVWLASLAIVTACAGAMKLSNFQGKLLMTINNTDIADVIVIPTSKGENRCWVRAIDVGYMCEDTITYECPKLAVGNDPEDVDCWCDNQEVYVQYGRCTRTRHSKRSRRSINVSINVQTHGESSLVNKKEAWLDSTKATRYLMKTENWIIRNPGYAFLAAALGWMLGSNSGQRVVFTILLLLVAPAYSFNCLGMGNRDFIEGASGATWVDLVLEGDSCLTIMANDKPTLDVRMINIEASQLAEVRSYCYHASINVTDISTVARCPTTGEAHNEKRADSSYVCKQGFTDRGWGNGCGLFGKGSIDTCAKFSCTNKAIGRMIQPENIKYEVGIFVHGTTTSENHGNYSAQVGASQAAKFTVTPNAPSITLKLGDYGEVTLDCEPRSGLNTEAFYVMTVGSKSFLVHREWFHDLSLPWTSPSSTAWRNRELLMEFEEAHATKQSINVVALGSQEGGLHQALAGAIVVEYSSSINVKLTSGHLKCRLKMDKLALKGTTYGMCTEKFSFAKNPADTGHGTVVIELTYSGSDGPCKIPIVSINVASLNDMTPVGRLVTVNPFVATSSSNSKVLVEMEPPFGDSYIVVGRGDKQINHHWHKAGSTLGKAFSTTLKGAQRLAALGDTAWDFGSIGGVFNSIGKAVHQVFGGAFRTLFGGMSWITQGLMGALLLWMGVNARDRSIALAFLATGGVLVFLATNVHADTGCAIDITRKEMRCGSGIFVHNDVEAWVDRYKYLPETPRSLAKIVHKAHQEGVCGVRSINVTRLEHQMWESINVRDELNVLLKENAVDLSINVVVNKPVGRYRSAPKRLSMTQEKFEMGWKAWGKSILFAPELANSTFVVDGPETKECPDERRAWNSMQIEDFGFGITSTRVWLKIREENTDECDGAIIGTAVKGHVAVHSDLSYWIESRLNDTWKLERAVFGEVKSCTWPETHTLWGDGVEESELIIPHTIAGPRSKHNRREGYKTQNQGPWDENGIVLDFDYCPGTKVTITEDCGKRGPSIRTTTDSGKLITDWCCRSCSLPPLRFRTENGCWYGMEIRPVRHDETTLVRSQVDAFNGEMIDPFQLGLLVMFLATQEVLRKRWTARLTIPAVLGALLVLMLGGITYTDMARYVVLVAAAFAEANSGGDVLHLALIAVFKIQPSFLVMNMLSARWTNQENVVLVLGAAFFQLASINVDLQIGVHGILNAAAIAWMIVRAITFPTTSTVAMPVLALLTPGMRALYLDTYRIILLVIGICSLLQERRKTMAKKKGAVLLGLALTSTGWFSPTTIAAGLMVCNPNKKRGWPATEFLSAVGLMFAIVGGLAELDIESMSIPFMLAGLMAVSYVVSGKATDMWLDRAADISWEMEAAITGSSRRLDVKLDDDGDFHLIDDPGVPWKVWLLRMSCIGLAALTPWAIVPAAFGYWLTLKTTKRGGVFWDTPSPKPCLKGDTTTGVYRIMARGILGTYQAGVGVMYENVFHTLWHTTRGAAIMSGEGKLTPYWGSINVKEDRISYGGPWRFDRKWNGTDDVQVIVVEPGKPAVNIQTKPGVFRTPFGEIGAVSLDYPRGTSGSPILDSNGDIIGLYGNGVELGDGSYVSAIVQGDRQEEPVPDAYTPGMLKKRQMTVLDLHPGSGKTRKILPQIIKDAIQQRLRTAVLAPTRVVAAEMAEALKGLPVRYQTSAVQREHQGNEIVDVMCHATLTHRLMSPNRVPNYNLFVMDEAHFTDPASIAARGYIATKVELGEAAAIFMTATPPGTTDPFPDSNAPIHDLQDEIPDRAWSSGYEWITDYAGKTVWFVASINVKMGNEIAMCLQRAGKKVIQLNRKSYDTEYPKCKNGDWDFVITTDISEMGANFGASRVIDCRKSINVKPTILEEGEGRVILGNPSPITSASAAQRRGRVGRNPNQVGDEYHYGGATSEDDSNLAHWTEAKIMLDNIHMPNGLVAQLYGPEREKAFTMDGEYRLRGEEKKNFLELLRTADLPVWLAYKVASNGIQYTDRKWCFDGPRTNAILEDNTEVEIVTRMGERKILKPRWLDARVYADHQALKWFKDFAAGKRSAVSFIEVLGRMPEHFMGKTREALDTMYLVATAEKGGKAHRMALEELPDALETITLIVAITVMTGGFFLLMMQRKGIGKMGLGALVLTLATFFLWAAEVPGTKIAGTLLVALLLMVVLIPEPEKQRSQTDNQLAVFLICVLTVVGVVAANEYGMLEKTKADLKSMFGGRTQASGLTGLPSMALDLRPATAWALYGGSTVVLTPLLKHLITSEYVTTSLASISSQAGSLFVLPRGVPFTDLDLTVGLVFLGCWGQITLTTFLTAMVLVTLHYGYMLPGWQAEALRAAQRRTAAGIMKNAVVDGMVATDVPELERTTPLMQKKVGQVLLIGVSINVAAFLVNPNVTTVREAGVLVTAATLTLWDNGASAVWNSTTATGLCHVMRGSYLAGGSIAWTLIKNADKPSLKRGRPGGRTLGEQWKEKLNAMSRDEFFKYRREAIIEVDRTEARRARRENNIVGGHPVSRGSAKLRWLVEKGFVSPIGKVIDLGCGRGGWSYYAATLKKVQEVKGYTKGGAGHEEPMLMQSYGWNLVSLKSGVDVFYKPSEPSDTLFCDIGESSPSPEVEEQRTLRVLEMTSDWLHRGPREFCIKVLCPYMPKVIEKMEVLQRRFGGGLVRLPLSRNSNHEMYWVSGAAGNVVHAVNMTSQVLLGRMDRTVWRGPKYEEDVNLGSGTRAVGKGEVHSNQEKIRKRIQKLKEEFATTWHKDPEHPYRTWTYHGSYEVKATGSASSLVNGVVKLMSKPWDAIANVTTMAMTDTTPFGQQRVFKEKVDTKAPEPPAGVKEVLNETTNWLWAHLSREKRPRLCTKEEFIKKVNSNAALGAVFAEQNQWSTAREAVGDPLFWEMVNEERENHLRGECHTCIYNMMGKREKKPGEFGKAKGSRAIWFMWLGARYLEFEALGFLNEDHWLSRENSGGGVEGSGVQKLGYILRDIAGKQGGKMYADDTAGWDTRITRTDLENEAKVLELLDGEHRMLARAIIELTYRHKVVKVMRPAAGGKTVMDVISREDQRGSGQVVTYALNTFTNIAVQLVRLMEAEGVIGPQHLEQLPRKNKIAVRTWLFENGEERVTRMAISGDDCVVKPLDDRFATALHFLNAMSKVRKDIQEWKPSHGWHDWQQVPFCSNHFQEIVMKDGRSIVVPCRGQDELIGRARISPGAGWNVKDTACLAKAYAQMWLLLYFHRRDLRLMANAICSAVPVDWVPTGRTSWSIHSKGEWMTTEDMLQVWNRVWIEENEWMMDKTPITSWTDVPYVGKREDIWCGSLIGTRSRATWAENVYAAINQVRAIIGKENYVDYMTSLRRYEDVLIQEDRVI

SEQ ID NO: 27 - protein, 3462 aa, unidentified
  source 1..3462: note = Japanese encephalitis virus
MTKKPGGPGKNRAINMLKRGLPRVFPLVGVKRVVMSLLDGRGPVRFVLALITFFKFTALAPTKALLGRWRAVEKSINVAMKHLTSFKRELGTLIDAVNKRGKKQNKRGGNESSIMWLASLAIVAACAGAMKLSNFQGKLLMTINNTDIADVIVIPTSKGENRCWVRAIDVGYMCEDTITYECPKLAVGNDPEDVDCWCDNQEVYVQYGRCTRTRHSKRSRRSINVSINVQTHGESSLVNKKEAWLDSTKATRYLMKTENWIIRNPGYAFLAAALGWMLGSNSGQRVVFTILLLLVAPAYSFNCLGMGNRDFIEGASGATWVDLVLEGDSCLTIMANDKPTLDVRMINIEASQLAEVRSYCYHASINVTDISTVARCPTTGEAHNEKRADSSYVCKQGFTDRGWGNGCGLFGKGSIDTCAKFSCTNKAIGRMIQPENIKYEVGIFVHGTTTSENHGNYSAQVGASQAAKFTVTPNAPSITLKLGDYGEVTLDCEPRSGLNTEAFYVMTVGSKSFLVHREWFHDLSLPWTSPSSTAWRNRELLMEFEEAHATKQSINVVALGSQEGGLHQALAGAIVVEYSSSINVKLTSGHLKCRLKMDKLALKGTTYGMCTEKFSFAKNPADTGHGTVVIELTYSGSDGPCKIPIVSINVASLNDMTPVGRLVTVNPFVATSSSNSKVLVEMEPPFGDSYIVVGRGDKQINHHWHKAGSTLGKAFSTTLKGAQRLAALGDTAWDFGSIGGVFNSIGKAVHQVFGGAFRTLFGGMSWITQGLMGALLLWMGVNARDRSIALAFLATGGVLVFLATNVHADTGCAIDITRKEMRCGSGIFVHNDVEAWVDRYKYLPETPRSLAKIVHKAHQEGVCGVRSINVTRLEHQMWESINVRDELNVLLKENAVDLSINVVVNKPVGRYRSAPKRLSMTQEKFEMGWKAWGKSILFAPELANSTFVVDGPETKECPDERRAWNSMQIEDFGFGITSTRVWLKIREENTDECDGAIIGTAVKGHVAVHSDLSYWIESRLNDTWKLERAVFGEVKSCTWPETHTLWGDGVEESELIIPHTIAGPRSKHNRREGYKTQNQGPWDENGIVLDFDYCPGTKVTITEDCGKRGPSIRTTTDSGKLITDWCCRSCSLPPLRFRTENGCWYGMEIRPVRHDETTLVRSQVDAFNGEMIDPFQLGLLVMFLATQEVLRKRWTARLTIPAVLGALLVLMLGGITYTDLARYVVLVAAAFAEANSGGDVLHLALIAVFKIQPSFLVMNMLSARWTNQENVVLVLGAAFFQLASINVDLQIGVHGILNAAAIAWMIVRAITFPTTSTVAMPVLALLTPGMRALYLDTYRIILLVIGICSLLQERRKTMAKKKGAVLLGLALTSTGWFSPTTIAAGLMVCNPNKKRGWPATEFLSAVGLMFAIVGGLAELDIESMSIPFMLAGLMAVSYVVSGKATDMWLDRAADISWEMEAAITGSSRRLDVKLDDDGDFHLIDDPGVPWKVWLLRMSCIGLAALTPWAIVPAAFGYWLTLKTTKRGGVFWDTPSPKPCLKGDTTTGVYRIMARGILGTYQAGVGVMYENVFHTLWHTTRGAAIMSGEGKLTPYWGSINVKEDRISYGGPWRFDRKWNGTDDVQVIVVEPGKPAVNIQTKPGVFRTPFGEIGAVSLDYPRGTSGSPILDSNGDIIGLYGNGVELGDGSYVSAIVQGDRQEEPVPDAYTPSMLKKRQMTVLDLHPGSGKTRKILPQIIKDAIQQRLRTAVLAPTRVVAAEMAEALKGLPVRYQTSAVQREHQGNEIVDVMCHATLTHRLMSPNRVPNYNLFVMDEAHFTDPASIAARGYIATKVELGEAAAIFMTATPPGTTDPFPDSNAPIHDLQDEIPDRAWSSGYEWITDYAGKTVWFVASINVKMGNEIAMCLQRAGKKVIQLNRKSYDTEYPKCKNGDWDFVITADISEMGANFGASRVIDCRKSINVKPTILEEGEGRVILGNPSPITSASAAQRRGRVGRNPNQVGDEYHYGGATSEDDSNLAHWTEAKIMLDNIHMPNGLVAQLYGPEREKAFTMDGEYRLRGEEKKNFLELLRTADLPVWLAYKVASNGIQYTDRKWCFDGPRTNAILEDNTEVEIVTRMGERKILKPRWLDARVYADHQALKWFKDFAAGKRSAVSFIEVLGRMPEHFMGKTREALDTMYLVATAEKGGKAHRMALEELPDALETITLIVAITVMTGGFFLLMMQRKGIGKMGLGALVLTLATFFLWAAEVPGTKIAGTLLVALLLMVVLIPEPEKQRSQTDNQLAVFLICVLTVVGVVAANEYGMLEKTKADLKSMFGGRTQASGLTGLPSMALDLRPATAWALYGGSTVVLTPLLKHLITSEYVTTSLASISSQAGSLFVLPRGVPFTDLDLTVGLVFLGCWGQITLTTFLTAMVLVTLHYGYMLPGWQAEALRAAQRRTAAGIMKNAVVDGMVATDVPELERTTPLMQKKVGQVLLIGVSINVAAFLVNPNVTTVREAGVLVTAATLTLWDNGASAVWNSTTATGLCHVMRGSYLAGGSIAWTLIKNADKPSLKRGRPGGRTLGEQWKEKLNAMSRDEFFKYRREAIIEVDRTEARRARRENNIVGGHPVSRGSAKLRWLVEKGFVSPIGKVIDLGCGRGGWSYYAATLKKVQEVKGYTKGGAGHEEPMLMQSYGWNLVSLKSGVDVFYKPSEPSDTLFCDIGESSPSPEVEEQRTLRVLEMTSDWLHRGPREFCIKVLCPYMPKVIEKMEVLQRRFGGGLVRLPLSRNSNHEMYWVSGAAGNVVHAVNMTSQVLLGRMDRTVWRGPKYEEDVNLGSGTRAVGKGEVHSNQEKIRKRIQKLKEEFATTWHKDPEHPYRTWTYHGSYEVKATGSASSLVNGVVKLMSKPWDAIANVTTMAMTDTTPFGQQRVFKEKVDTKAPEPPAGVKEVLNETTNWLWAHLSREKRPRLCTKEEFIKKVNSNAALGAVFAEQNQWSTAREAVGDPLFWEMVNEERENHLRGECHTCIYNMMGKREKKPGEFGKAKGSRAIWFMWLGARYLEFEALGFLNEDHWLSRENSGGGVEGSGVQKLGYILRDIAGKQGGKMYADDTAGWDTRITRTDLENEAKVLELLDGEHRMLARAIIELTYRHKVVKVMRPAAGGKTVMDVISREDQRGSGQVVTYALNTFTNIAVQLVRLMEAEGVIGPQHLEQLPRKNKIAVRTWLFENGEERVARMAISGDDCVVKPLDDRFATALHFLNAMSKVRKDIQEWKPSHGWHDWQQVPFCSNHFQEIVMKDGRSIVVPCRGQDELIGRARISPGAGWNVKDTACLAKAYAQMWLLLYFHRRDLRLMANAICSAVPVDWVPTGRTSWSIHSKGEWMTTEDMLQVWNRVWIEENEWMMDKTPITSWTDVPYVGKREDIWCGSLIGTRSRATWAENVYAAINQVRAIIGKENYVDYMTSLRRYEDVLIQEDRVI

SEQ ID NO: 28 - protein, 3462 aa, unidentified
  source 1..3462: note = Japanese encephalitis virus
MTKKPGGPGKNRAINMLKRGLPRVFPLVGVKRVVMSLLDGRGPVRFVLALVAFFKFTALAPTKALLGRWRAVEKSINVAMKHLTSFKRELGTLIDAVNKRGKKQNKRGGNESSIVWLASLAIVTACAGAMKLSNFQGKLLMTINNTDIADVIVIPTSKGENRCWVRAIDVGYMCEDTITYECPKLAVGNDPEDVDCWCDNQEVFVQYGRCTRTRHSKRSRRSINVSINVQTHGESSLVNKKEAWLDSTKATRYLMKTENWIIRNPGYAFLAAALGWMLGSNSGQRVVFTILLLLVAPAYSFNCLGMGNRDFIEGASGATWVDLVLEGDSCLTIMANDKPTLDVRMINIEASQLAEVRSYCYHASINVTDISTVARCPTTGEAHNEKRADSSYVCKQGFTDRGWGNGCGLFGKGSIDTCAKFSCTSKAIGRTIQPENIKYEVGVFVHGTTTSENHGNYSAQVGASQAAKFTVTPNAPSITLKLGDYGEVTLDCEPRSGLNTEAFYVMTVGSKSFLVHREWFHDLSLPWTSPSSTAWRNRELLMEFEEAHATKQSINVVALGSQEGGLHQALAGAIVVEYSSSINVKLTSGHLKCRLKMDKLALKGTTYGMCTEKFSFAKNPADTGHGTVVIELTYSGSDGPCKIPIVSINVASLNDMTPVGRLVTVNPFVATSSSNSKVLVEMEPPFGDSYIVVGRGDKQINHHWHKAGSTLGKAFSTTLKGAQRLAALGDTAWDFGSIGGVFNSIGKAVHQVFGGAFRTLFGGMSWITQGLMGALLLWMGVNARDRSIALAFLATGGVLVFLATNVHADTGCAIDITRKEMRCGSGIFVHNDVEAWVDRYKYLPETPRSLAKIVHKAHQEGVCGVRSINVTRLEHQMWESINVRDELNVLLKENAVDLSINVVVNKPVGRYRSAPKRLSMTQEKFEMGWKAWGKSILFAPELANSTFVVDGPETKECPDERRAWNSMQIEDFGFGITSTRVWLKIREEDTDECDGAIIGTAVKGHVAVHSDLSYWIESRFNDTWKLERAVFGEVKSCTWPETHTLWGDGVEESELIIPHTIAGPRSKHNRREGYKTQNQGPWDENGIVLDFDYCPGTKVTITEDCGKRGPSIRTTTDSGKLITDWCCRSCSLPPLRFRTENGCWYGMEIRPVRHDETTLVRSQVDAFNGEMIDPFQLGLLVMFLATQEVLRKRWTARLTIPAVLGALLVLMLGGITYTDLARYVVLVAAAFAEANSGGDVLHLALIAVFKIQPAFLVMNMLSARWTNQENMVLVLGAAFFQLASINVDLQIGVHGILNAAAIAWMIVRAITFPTTSTVTMPVLALLTPGMRALYLDTYRIILLVIGICSLLQERRKTMAKKKGAVLLGLALTSTGWFSPTTIAAGLMVCNPNKKRGWPATEFLSAVGLMFAIVGGLAELDIESMSIPFMLAGLMAVSYVVSGKATDMWLDRAADISWEMEAAITGSSRRLDVKLDDDGDFHLIDDPGVPWKVWLLRMSCIGLAALTPWAIVPAAFGYWLTLKTTKRGGVFWDTPSPKPCLKGDTTTGVYRIMARGILGTYQAGVGVMYENVFHTLWHTTRGAAIMSGEGKLTPYWGSINVKEDRISYGGPWRFDRKWNGTDDVQVIVVEPGKPAVNIQTKPGVFRTPFGEIGAVSLDYPRGTSGSPILDSNGDIIGLYGNGVELGDGSYVSAIVQGDRQEEPVPDAYTPSMLKKRQMTVLDLHPGSGKTRKILPQIIKDAIQQRLRTAVLAPTRVVAAEMAEALRGLPVRYQTSAVQREHQGNEIVDVMCHATLTHRLMSPNRVPNYNLFVMDEAHFTDPASIAARGYIATKVELGEAAAIFMTATPPGTTDPFPDSNAPIHDLQDEIPDRAWSSGYEWITEYAGKTVWFVASINVKMGNEIAMCLQRAGKKVIQLNRKSYDTEYPKCKNGDWDFVITTDISEMGANFGASRVIDCRKSINVKPTILEEGEGRVILGNPSPITSASAAQRRGRVGRNPNQVGDEYHYGGATSEDDSNLAHWTEAKIMLDNIHMPNGLVAQLYGPEREKAFTMDGEYRLRGEEKKNFLELLRTADLPVWLAYKVASNGIQYTDRKWCFDGPRTNAILEDNTEVEIVTRMGERKILKPRWLDARVYADHQALKWFKDFAAGKRSAVSFIEVLGRMPEHFMGKTREALDTMYLVATAEKGGKAHRMALEELPDALETITLIVAITVMTGGFFLLMMQRKGIGKMGLGALVLTLATFFLWAAEVPGTKIAGTLLVALLLMVVLIPEPEKQRSQTDNQLAVFLICVLTVVGVVAANEYGMLEKTKADLKSMFGGRTQAPGLTGLPSMALDLRPATAWALYGGSTVVLTPLLKHLITSEYVTTSLASISSQAGSLFVLPRGVPFTDLDLTVGLVFLGCWGQITLTTFLTAMVLVTLHYGYMLPGWQAEALRAAQRRTAAGIMKNAVVDGMVATDVPELERTTPLMQKKVGQVLLIGVSINVAAFLVNPNVTTVREAGVLVTAATLTLWDNGASAVWNSTTATGLCHVMRGSYLAGGSIAWTLIKNADKPSLKRGRPGGRTLGEQWKEKLNAMSRDEFFKYRREAIIEVDRTEARRARRENNIVGGHPVSRGSAKLRWLVEKGFVSPIGKVIDLGCGRGGWSYYAATLKKVQEVKGYTKGGAGHEEPMLMQSYGWNLVSLKSGVDVFYKPSEPSDTLFCDIGESSPSPEVEEQRTLRVLEMTSDWLHRGPREFCIKVLCPYMPKVIEKMEVLQRRFGGGLVRLPLSRNSNHEMYWVSGAAGNVVHAVNMTSQVLLGRMDRTVWRGPKYEEDVNLGSGTRAVGKGEVHSNQEKIRKRIQKLREEFATTWHKDPEHPYRTWTYHGSYEVKATGSASSLVNGVVKLMSKPWDAIANVTTMAMTDTTPFGQQRVFKEKVDTKAPEPPAGVKEVLNETTNWLWAHLSREKRPRLCTKEEFIKKVNSNAALGAVFAEQNQWSTAREAVGDPLFWEMVDEERENHLRGECHTCIYNMMGKREKKPGEFGKAKGSRAIWFMWLGARYLEFEALGFLNEDHWLSRENSGGGVEGSGVQKLGYILRDIAGKQGGKMYADDTAGWDTRITRTDLENEAKVLELLDGEHRMLARAIIELTYRHKVVKVMRPAAGGKTVMDVISREDQRGSGQVVTYALNTFTNIAVQLVRLMEAEGVIGPQHLEQLPRKNKIAVRTWLFENGEERVTRMAISGDDCVVKPLDDRFATALHFLNAMSKVRKDIQEWKPSHGWHDWQQVPFCSNHFQEIVMKDGRSIVVPCRGQDELIGRARISPGAGWNVKDTACLAKAYAQMWLLLYFHRRDLRLMANAICSAVPVDWVPTGRTSWSIHSKGEWMTTEDMLQVWNRVWIEENEWMTDKTPITSWTDVPYVGKREDIWCGSLIGTRSRATWAENIYAAINQVRAVIGKENYVDYMTSLRRYEDVLIQEDRVI

SEQ ID NO: 29 - protein, 3462 aa, unidentified
  source 1..3462: note = Japanese encephalitis virus
MTKKPGGPGKNRAINMLKRGLPRVFPLVGVKRVVMSLLDGRGPVRFVLALITFFKFTALAPTKALLGRWRAVEKSINVAMKHLTSFKRELGTLIDAVNKRGKKQNKRGGNESSIMWLASLAIVTACAGAMKLSNFQGKLLMTINNTDIADVIVIPTSKGENRCWVRAIDVGYMCEDTITYECPKLAVGNDPEDVDCWCDNQEVFVQYGRCTRTRHSKRSRRSINVSINVQTHGESSLVNKKEAWLDSTKATRYLMKTENWIIRNPGYAFLAAALGWMLGSNSGQRVVFTILLLLVAPAYSFNCLGMGNRDFIEGASGATWVDLVLEGDSCLTIMANDKPTLDVRMINIEASQLAEVRSYCYHASINVTDISTVARCPTTGEAHNEKRADSSYVCKQGFTDRGWGNGCGLFGKGSIDTCAKFSCTSKAIGRTIQPENIKYEVGVFVHGTTTSENHGNYSAQVGASQAAKFTVTPNAPSITLKLGDYGEVTLDCEPRSGLNTEAFYVMTVGSKSFLVHREWFHDLSLPWTSPSSTAWRNRELLMEFEEAHATKQSINVVALGSQEGGLHQALAGAIVVEYSSSINVKLTSGHLKCRLKMDKLALKGTTYGMCTEKFSFAKNPADTGHGTVVIELTYSGSDGPCKIPIVSINVASLNDMTPVGRLVTVNPFVATSSSNSKVLVEMEPPFGDSYIVVGRGDKQINHHWHKAGSTLGKAFSTTLKGAQRLAALGDTAWDFGSIGGVFNSIGKAVHQVFGGAFRTLFGGMSWITQGLMGALLLWMGVNARDRSIALAFLATGGVLVFLATNVHADTGCAIDITRKEMRCGSGIFVHNDVEAWVDRYKYLPETPRSLAKIVHKAHQEGVCGVRSINVTRLEHQMWESINVRDELNVLLKENAVDLSINVVVNKPVGRYRSAPKRLSMTQEKFEMGWKAWGKSILFAPELANSTFVVDGPETKECPDERRAWNSMQIEDFGFGITSTRVWLKIREEDTDECDGAIIGTAVKGHVAVHSDLSYWIESRLNDTWKLERAVFGEVKSCTWPETHTLWGDGVEESELIIPHTIAGPKSKHNRREGYKTQNQGPWDENGIVLDFDYCPGTKVTITEDCGKRGPSIRTTTDSGKLITDWCCRSCSLPPLRFRTENGCWYGMEIRPVRHDETTLVRSQVDAFNGEMIDPFQLGLLVMFLATQEVLRKRWTARLTIPAVLGALLVLMLGGITYTDLARYVVLVAAAFAEANSGGDVLHLALIAVFKIQPAFLVMNMLSARWTNQENMVLVLGAAFFQLASINVDLQIGVHGILNAAAIAWMIVRAITFPTTSTVTMPVLALLTPGMRALYLDTYRIILLVIGTCSLLQERRKTMAKKKGAVLLGLALTSTGWFSPTTIAAGLMVCNPNKKRGWPATEFLSAVGLMFAIVGGLAELDIESMSIPFMLAGLMAVSYVVSGKATDMWLDRAADISWEMEAAITGSSRRLDVKLDDDGDFHLIDDPGVPWKVWLLRMSCIGLAALTPWAIVPAAFGYWLTLKTTKRGGVFWDTPSPKPCLKGDTTTGVYRIMARGILGTYQAGVGVMYENVFHTLWHTTRGAAIMSGEGKLTPYWGSINVKEDRISYGGPWRFDRKWNGTDDVQVIVVEPGKPAVNIQTKPGVFRTPFGEIGAVSLDYPRGTSGSPILDSNGDIIGLYGNGVELGDGSYVSAIVQGDRQEEPVPDAYTPSMLKKRQMTVLDLHPGSGKTRKILPQIIKDAIQQRLRTAVLAPTRVVAAEMAEALRGLPVRYQTSAVQREHQGNEIVDVMCHATLTHRLMSPNRVPNYNLFVMDEAHFTDPASIAARGYIATKVELGEAAAIFMTATPPGTTDPFPDSNAPIHDLQDEIPDRAWSSGYEWITEYAGKTVWFVASINVKMGNEIAMCLQRAGKKVIQLNRKSYDTEYPKCKNGDWDFVITTDISEMGANFGASRVIDCRKSINVKPTILEEGEGRVILGNPSPITSASAAQRRGRVGRNPNQVGDEYHYGGATSEDDSNLAHWTEAKIMLDNIHMPNGLVAQLYGPEREKAFTMDGEYRLRGEEKKNFLELLRTADLPVWLAYKVASNGIQYTDRKWCFDGPRTNAILEDNTEVEIVTRMGERKILKPRWLDARVYADHQALKWFKDFAAGKRSAVSFIEVLGRMPEHFMGKTREALDTMYLVATAEKGGKAHRMALEELPDALETITLIVAITVMTGGFFLLMMQRKGIGKMGLGALVLTLATFFLWAAEVPGTKIAGTLLVALLLMVVLIPEPEKQRSQTDNQLAVFLICVLTVVGVVAANEYGMLEKTKADLKSMFGGRTQAPGLTGLPSMALDLRPATAWALYGGSTVVLTPLLKHLITSEYVTTSLASISSQAGSLFVLPRGVPFTDLDLTVGLVFLGCWGQITLTTFLTAMVLVTLHYGYMLPGWQAEALRAAQRRTAAGIMKNAVVDGMVATDVPELERTTPLMQKKVGQVLLIGVSINVAAFLVNPNVTTVREAGVLVTAATLTLWDNGASAVWNSTTATGLCHVMRGSYLAGGSIAWTLIKNADKPSLKRGRPGGRTLGEQWKEKLNAMSRDEFFKYRREAIIEVDRTEARRARRENNIVGGHPVSRGSAKLRWLVEKGFVSPIGKVIDLGCGRGGWSYYAATLKKVQEVKGYTKGGAGHEEPMLMQSYGWNLVSLKSGVDVFYKPSEPSDTLFCDIGESSPSPEVEEQRTLRVLEMTSDWLHRGPREFCIKVLCPYMPKVIEKMEVLQRRFGGGLVRLPLSRNSNHEMYWVSGAAGNVVHAVNMTSQVLLGRMDRTVWRGPKYEEDVNLGSGTRAVGKGEVHSNQEKIRKRIQKLREEFATTWHKDPEHPYRTWTYHGSYEVKATGSASSLVNGVVKLMSKPWDAIANVTTMAMTDTTPFGQQRVFKEKVDTKAPEPPAGVKEVLNETTNWLWAHLSREKRPRLCTKEEFIKKVNSNAALGAVFAEQNQWSTAREAVGDPLFWEMVDEERENHLRGECHTCIYNMMGKREKKPGEFGKAKGSRAIWFMWLGARYLEFEALGFLNEDHWLSRENSGGGVEGSGVQKLGYILRDIAGKQGGKMYADDTAGWDTRITRTDLENEAKVLELLDGEHRMLARAIIELTYRHKVVKVMRPAAGGKTVMDVISREDQRGSGQVVTYALNTFTNIAVQLVRLMEAEGVIGPQHLEQLPRKNKIAVRTWLFENGEERVTRMAISGDDCVVKPLDDRFATALHFLNAMSKVRKDIQEWKPSHGWHDWQQVPFCSNHFQEIVMKDGRSIVVPCRGQDELIGRARISPGAGWNVKDTACLAKAYAQMWLLLYFHRRDLRLMANAICSAVPVDWVPTGRTSWSIHSKGEWMTTEDMLQVWNRVWIEENEWMMDKTPITSWTDVPYVGKREDIWCGSLIGTRSRATWAENIYAAINQVRAVIGKENYVDYMISLRRYEDVLIQEDRVI

SEQ ID NO: 30 - DNA, 2049 bp, unidentified
  source 1..2049: mol_type = genomic DNA; note = West Nile Virus
atgtggcttgtcagcttggcaatcgtaacagcttgtgccggagctatgaagctctctaacttccaagggaaggtgatgatgacggtaaatgctactgacgtcacagatgtcatcacgattccaacagctgctggaaagaacctatgcattgtcagagcaatggatgtgggatacatgtgcgatgatactatcacttatgaatgcccagtgctgtcggctggcaatgatccagaagacatcgactgttggtgcacaaagtcagcagtctacgtcaggtatggaagatgcaccaagacacgccactcaagacgcagtcggaggtcactgacagtgcagacacacggagaaagcactctagcgaacaagaagggggcttggatggacagcaccaaggccacaaggtatttggtaaaaacagaatcatggatcttgaggaaccctggatatgccctggtggcagccgtcattggttggatgcttgggagcaacaccatgcagagagttgtgtttgtcgtgctattgcttttggtggccccagcttacagcttcaactgccttggaatgagcaacagagacttcttggaaggagtgtctggagcaacatgggtggatttggttctcgaaggcgacagctgcgtgactatcatgtctaaggacaagcctaccatcgatgtgaagatgatgaatatggaggcggccaacctggcagaggtccgcagttattgctatttggctaccgtcagcgatctctccaccaaagctgcgtgcccgaccatgggagaagctcacaatgacaaacgtgctgacccagcttttgtgtgcagacaaggagtggtggacaggggctggggcaacggctgcggactatttggcaaaggaagcattgacacatgcgccaaatttgcctgctctaccaaggcaataggaagaaccatcttgaaagagaatatcaagtatgaagtggccatttttgtccatgggccaactactgtggagtcgcacggaaactactccacacaggctggagccactcaggcagggagattcagcatcactcctgcggcgccttcatacacactaaagcttggagaatatggagaggtgacagtggactgtgaaccacggtcagggattgacaccaatgcatactacgtgatgactgttggaacaaagacgttcttggtccatcgtgagtggttcatggacctcaacctcccttggagcagtgctggaagtactgtgtggaggaacagagagacgttaatggagtttgaggaaccgcacgccacgaagcagtctgtgatagcattgggctcacaagagggagctctgcatcaagctttggctggagccattcctgtggaattttcaagcaacactgtcaagttgacgtcgggtcatttgaagtgtagagtgaagatggaaaaattgcagttgaagggaacaacctatggcgtctgttcaaaggctttcaagtttcttgggactcccgcagacacaggtcacggcactgtggtgttggaattgcagtacactggcacggacggaccttgcaaagttcctatctcgtcagtggcttcattgaacgacctaacgccagtgggtagattggtcactgtcaacccttttgtttcagtggccacggccaacgctaaggtcctgattgaattggaaccaccctttggagactcatacatagtggtgggcagaggagaacaacagatcaatcatcattggcacaagtctggaagcagcattggcaaagcctttacaaccaccctcaaaggagcgcagagactagccgctctaggagacacagcttgggactttggatcagttggaggggtgttcacctcagttgggaaggctgtccatcaagtgttcggaggagcattccgctcactgttcggaggcatgtcctggataacgcaaggattgctgggggctctcttgttgtggatgggcatcaatgctcgtgataggtccatagctctcacgtttctcgcagttggaggagttctgctcttcctctccgtgaacgtgcatgct

SEQ ID NO: 31 - DNA, 1506 bp, unidentified
  source 1..1506: mol_type = genomic DNA; note = West Nile Virus
atgttcaactgccttggaatgagcaacagagacttcttggaaggagtgtctggagcaacatgggtggatttggttctcgaaggcgacagctgcgtgactatcatgtctaaggacaagcctaccatcgatgtgaagatgatgaatatggaggcggccaacctggcagaggtccgcagttattgctatttggctaccgtcagcgatctctccaccaaagctgcgtgcccgaccatgggagaagctcacaatgacaaacgtgctgacccagcttttgtgtgcagacaaggagtggtggacaggggctggggcaacggctgcggactatttggcaaaggaagcattgacacatgcgccaaatttgcctgctctaccaaggcaataggaagaaccatcttgaaagagaatatcaagtatgaagtggccatttttgtccatgggccaactactgtggagtcgcacggaaactactccacacaggctggagccactcaggcagggagattcagcatcactcctgcggcgccttcatacacactaaagcttggagaatatggagaggtgacagtggactgtgaaccacggtcagggattgacaccaatgcatactacgtgatgactgttggaacaaagacgttcttggtccatcgtgagtggttcatggacctcaacctcccttggagcagtgctggaagtactgtgtggaggaacagagagacgttaatggagtttgaggaaccgcacgccacgaagcagtctgtgatagcattgggctcacaagagggagctctgcatcaagctttggctggagccattcctgtggaattttcaagcaacactgtcaagttgacgtcgggtcatttgaagtgtagagtgaagatggaaaaattgcagttgaagggaacaacctatggcgtctgttcaaaggctttcaagtttcttgggactcccgcagacacaggtcacggcactgtggtgttggaattgcagtacactggcacggacggaccttgcaaagttcctatctcgtcagtggcttcattgaacgacctaacgccagtgggtagattggtcactgtcaacccttttgtttcagtggccacggccaacgctaaggtcctgattgaattggaaccaccctttggagactcatacatagtggtgggcagaggagaacaacagatcaatcatcattggcacaagtctggaagcagcattggcaaagcctttacaaccaccctcaaaggagcgcagagactagccgctctaggagacacagcttgggactttggatcagttggaggggtgttcacctcagttgggaaggctgtccatcaagtgttcggaggagcattccgctcactgttcggaggcatgtcctggataacgcaaggattgctgggggctctcttgttgtggatgggcatcaatgctcgtgataggtccatagctctcacgtttctcgcagttggaggagttctgctcttcctctccgtgaacgtgcatgct

SEQ ID NO: 32 - DNA, 1778 bp, unidentified
  source 1..1778: mol_type = genomic DNA; note = West Nile Virus
ggggaaataagagagaaaagaagagtaagaagaaatataagagccaccatgttcaactgccttggaatgagcaacagagacttcttggaaggagtgtctggagcaacatgggtggatttggttctcgaaggcgacagctgcgtgactatcatgtctaaggacaagcctaccatcgatgtgaagatgatgaatatggaggcggccaacctggcagaggtccgcagttattgctatttggctaccgtcagcgatctctccaccaaagctgcgtgcccgaccatgggagaagctcacaatgacaaacgtgctgacccagcttttgtgtgcagacaaggagtggtggacaggggctggggcaacggctgcggactatttggcaaaggaagcattgacacatgcgccaaatttgcctgctctaccaaggcaataggaagaaccatcttgaaagagaatatcaagtatgaagtggccatttttgtccatgggccaactactgtggagtcgcacggaaactactccacacaggctggagccactcaggcagggagattcagcatcactcctgcggcgccttcatacacactaaagcttggagaatatggagaggtgacagtggactgtgaaccacggtcagggattgacaccaatgcatactacgtgatgactgttggaacaaagacgttcttggtccatcgtgagtggttcatggacctcaacctcccttggagcagtgctggaagtactgtgtggaggaacagagagacgttaatggagtttgaggaaccgcacgccacgaagcagtctgtgatagcattgggctcacaagagggagctctgcatcaagctttggctggagccattcctgtggaattttcaagcaacactgtcaagttgacgtcgggtcatttgaagtgtagagtgaagatggaaaaattgcagttgaagggaacaacctatggcgtctgttcaaaggctttcaagtttcttgggactcccgcagacacaggtcacggcactgtggtgttggaattgcagtacactggcacggacggaccttgcaaagttcctatctcgtcagtggcttcattgaacgacctaacgccagtgggtagattggtcactgtcaacccttttgtttcagtggccacggccaacgctaaggtcctgattgaattggaaccaccctttggagactcatacatagtggtgggcagaggagaacaacagatcaatcatcattggcacaagtctggaagcagcattggcaaagcctttacaaccaccctcaaaggagcgcagagactagccgctctaggagacacagcttgggactttggatcagttggaggggtgttcacctcagttgggaaggctgtccatcaagtgttcggaggagcattccgctcactgttcggaggcatgtcctggataacgcaaggattgctgggggctctcttgttgtggatgggcatcaatgctcgtgataggtccatagctctcacgtttctcgcagttggaggagttctgctcttcctctccgtgaacgtgcatgcttgataataggctggagcctcggtggccatgcttcttgccccttgggcctccccccagcccctcctccccttcctgcacccgtacccccgtggtctttgaataaagtctgagtgggcggcaaaaaaaaaaaaaaaaaaaaaaaaaaaaaaaaaaaaaaaaaaaaaaaaaaaaaaaaaaaaaaaaaaaaaaaaaaaaaaaaaaaaaaaaaaaaaaaaaaaatctag

SEQ ID NO: 33 - DNA, 1557 bp, unidentified
  source 1..1557: mol_type = genomic DNA; note = West Nile Virus
atgcagagagttgtgtttgtcgtgctattgcttttggtggccccagcttacagcttcaactgccttggaatgagcaacagagacttcttggaaggagtgtctggagcaacatgggtggatttggttctcgaaggcgacagctgcgtgactatcatgtctaaggacaagcctaccatcgatgtgaagatgatgaatatggaggcggccaacctggcagaggtccgcagttattgctatttggctaccgtcagcgatctctccaccaaagctgcgtgcccgaccatgggagaagctcacaatgacaaacgtgctgacccagcttttgtgtgcagacaaggagtggtggacaggggctggggcaacggctgcggactatttggcaaaggaagcattgacacatgcgccaaatttgcctgctctaccaaggcaataggaagaaccatcttgaaagagaatatcaagtatgaagtggccatttttgtccatgggccaactactgtggagtcgcacggaaactactccacacaggctggagccactcaggcagggagattcagcatcactcctgcggcgccttcatacacactaaagcttggagaatatggagaggtgacagtggactgtgaaccacggtcagggattgacaccaatgcatactacgtgatgactgttggaacaaagacgttcttggtccatcgtgagtggttcatggacctcaacctcccttggagcagtgctggaagtactgtgtggaggaacagagagacgttaatggagtttgaggaaccgcacgccacgaagcagtctgtgatagcattgggctcacaagagggagctctgcatcaagctttggctggagccattcctgtggaattttcaagcaacactgtcaagttgacgtcgggtcatttgaagtgtagagtgaagatggaaaaattgcagttgaagggaacaacctatggcgtctgttcaaaggctttcaagtttcttgggactcccgcagacacaggtcacggcactgtggtgttggaattgcagtacactggcacggacggaccttgcaaagttcctatctcgtcagtggcttcattgaacgacctaacgccagtgggtagattggtcactgtcaacccttttgtttcagtggccacggccaacgctaaggtcctgattgaattggaaccaccctttggagactcatacatagtggtgggcagaggagaacaacagatcaatcatcattggcacaagtctggaagcagcattggcaaagcctttacaaccaccctcaaaggagcgcagagactagccgctctaggagacacagcttgggactttggatcagttggaggggtgttcacctcagttgggaaggctgtccatcaagtgttcggaggagcattccgctcactgttcggaggcatgtcctggataacgcaaggattgctgggggctctcttgttgtggatgggcatcaatgctcgtgataggtccatagctctcacgtttctcgcagttggaggagttctgctcttcctctccgtgaacgtgcatgct

SEQ ID NO: 34 - DNA, 1829 bp, unidentified
  source 1..1829: mol_type = genomic DNA; note = West Nile Virus
ggggaaataagagagaaaagaagagtaagaagaaatataagagccaccatgcagagagttgtgtttgtcgtgctattgcttttggtggccccagcttacagcttcaactgccttggaatgagcaacagagacttcttggaaggagtgtctggagcaacatgggtggatttggttctcgaaggcgacagctgcgtgactatcatgtctaaggacaagcctaccatcgatgtgaagatgatgaatatggaggcggccaacctggcagaggtccgcagttattgctatttggctaccgtcagcgatctctccaccaaagctgcgtgcccgaccatgggagaagctcacaatgacaaacgtgctgacccagcttttgtgtgcagacaaggagtggtggacaggggctggggcaacggctgcggactatttggcaaaggaagcattgacacatgcgccaaatttgcctgctctaccaaggcaataggaagaaccatcttgaaagagaatatcaagtatgaagtggccatttttgtccatgggccaactactgtggagtcgcacggaaactactccacacaggctggagccactcaggcagggagattcagcatcactcctgcggcgccttcatacacactaaagcttggagaatatggagaggtgacagtggactgtgaaccacggtcagggattgacaccaatgcatactacgtgatgactgttggaacaaagacgttcttggtccatcgtgagtggttcatggacctcaacctcccttggagcagtgctggaagtactgtgtggaggaacagagagacgttaatggagtttgaggaaccgcacgccacgaagcagtctgtgatagcattgggctcacaagagggagctctgcatcaagctttggctggagccattcctgtggaattttcaagcaacactgtcaagttgacgtcgggtcatttgaagtgtagagtgaagatggaaaaattgcagttgaagggaacaacctatggcgtctgttcaaaggctttcaagtttcttgggactcccgcagacacaggtcacggcactgtggtgttggaattgcagtacactggcacggacggaccttgcaaagttcctatctcgtcagtggcttcattgaacgacctaacgccagtgggtagattggtcactgtcaacccttttgtttcagtggccacggccaacgctaaggtcctgattgaattggaaccaccctttggagactcatacatagtggtgggcagaggagaacaacagatcaatcatcattggcacaagtctggaagcagcattggcaaagcctttacaaccaccctcaaaggagcgcagagactagccgctctaggagacacagcttgggactttggatcagttggaggggtgttcacctcagttgggaaggctgtccatcaagtgttcggaggagcattccgctcactgttcggaggcatgtcctggataacgcaaggattgctgggggctctcttgttgtggatgggcatcaatgctcgtgataggtccatagctctcacgtttctcgcagttggaggagttctgctcttcctctccgtgaacgtgcatgcttgataataggctggagcctcggtggccatgcttcttgccccttgggcctccccccagcccctcctccccttcctgcacccgtacccccgtggtctttgaataaagtctgagtgggcggcaaaaaaaaaaaaaaaaaaaaaaaaaaaaaaaaaaaaaaaaaaaaaaaaaaaaaaaaaaaaaaaaaaaaaaaaaaaaaaaaaaaaaaaaaaaaaaaaaaaatctag

SEQ ID NO: 35 - RNA, 2049 nt, unidentified
  source 1..2049: mol_type = genomic RNA; note = West Nile Virus
atgtggcttgtcagcttggcaatcgtaacagcttgtgccggagctatgaagctctctaacttccaagggaaggtgatgatgacggtaaatgctactgacgtcacagatgtcatcacgattccaacagctgctggaaagaacctatgcattgtcagagcaatggatgtgggatacatgtgcgatgatactatcacttatgaatgcccagtgctgtcggctggcaatgatccagaagacatcgactgttggtgcacaaagtcagcagtctacgtcaggtatggaagatgcaccaagacacgccactcaagacgcagtcggaggtcactgacagtgcagacacacggagaaagcactctagcgaacaagaagggggcttggatggacagcaccaaggccacaaggtatttggtaaaaacagaatcatggatcttgaggaaccctggatatgccctggtggcagccgtcattggttggatgcttgggagcaacaccatgcagagagttgtgtttgtcgtgctattgcttttggtggccccagcttacagcttcaactgccttggaatgagcaacagagacttcttggaaggagtgtctggagcaacatgggtggatttggttctcgaaggcgacagctgcgtgactatcatgtctaaggacaagcctaccatcgatgtgaagatgatgaatatggaggcggccaacctggcagaggtccgcagttattgctatttggctaccgtcagcgatctctccaccaaagctgcgtgcccgaccatgggagaagctcacaatgacaaacgtgctgacccagcttttgtgtgcagacaaggagtggtggacaggggctggggcaacggctgcggactatttggcaaaggaagcattgacacatgcgccaaatttgcctgctctaccaaggcaataggaagaaccatcttgaaagagaatatcaagtatgaagtggccatttttgtccatgggccaactactgtggagtcgcacggaaactactccacacaggctggagccactcaggcagggagattcagcatcactcctgcggcgccttcatacacactaaagcttggagaatatggagaggtgacagtggactgtgaaccacggtcagggattgacaccaatgcatactacgtgatgactgttggaacaaagacgttcttggtccatcgtgagtggttcatggacctcaacctcccttggagcagtgctggaagtactgtgtggaggaacagagagacgttaatggagtttgaggaaccgcacgccacgaagcagtctgtgatagcattgggctcacaagagggagctctgcatcaagctttggctggagccattcctgtggaattttcaagcaacactgtcaagttgacgtcgggtcatttgaagtgtagagtgaagatggaaaaattgcagttgaagggaacaacctatggcgtctgttcaaaggctttcaagtttcttgggactcccgcagacacaggtcacggcactgtggtgttggaattgcagtacactggcacggacggaccttgcaaagttcctatctcgtcagtggcttcattgaacgacctaacgccagtgggtagattggtcactgtcaacccttttgtttcagtggccacggccaacgctaaggtcctgattgaattggaaccaccctttggagactcatacatagtggtgggcagaggagaacaacagatcaatcatcattggcacaagtctggaagcagcattggcaaagcctttacaaccaccctcaaaggagcgcagagactagccgctctaggagacacagcttgggactttggatcagttggaggggtgttcacctcagttgggaaggctgtccatcaagtgttcggaggagcattccgctcactgttcggaggcatgtcctggataacgcaaggattgctgggggctctcttgttgtggatgggcatcaatgctcgtgataggtccatagctctcacgtttctcgcagttggaggagttctgctcttcctctccgtgaacgtgcatgct

SEQ ID NO: 36 - RNA, 1506 nt, unidentified
  source 1..1506: mol_type = genomic RNA; note = West Nile Virus
atgttcaactgccttggaatgagcaacagagacttcttggaaggagtgtctggagcaacatgggtggatttggttctcgaaggcgacagctgcgtgactatcatgtctaaggacaagcctaccatcgatgtgaagatgatgaatatggaggcggccaacctggcagaggtccgcagttattgctatttggctaccgtcagcgatctctccaccaaagctgcgtgcccgaccatgggagaagctcacaatgacaaacgtgctgacccagcttttgtgtgcagacaaggagtggtggacaggggctggggcaacggctgcggactatttggcaaaggaagcattgacacatgcgccaaatttgcctgctctaccaaggcaataggaagaaccatcttgaaagagaatatcaagtatgaagtggccatttttgtccatgggccaactactgtggagtcgcacggaaactactccacacaggctggagccactcaggcagggagattcagcatcactcctgcggcgccttcatacacactaaagcttggagaatatggagaggtgacagtggactgtgaaccacggtcagggattgacaccaatgcatactacgtgatgactgttggaacaaagacgttcttggtccatcgtgagtggttcatggacctcaacctcccttggagcagtgctggaagtactgtgtggaggaacagagagacgttaatggagtttgaggaaccgcacgccacgaagcagtctgtgatagcattgggctcacaagagggagctctgcatcaagctttggctggagccattcctgtggaattttcaagcaacactgtcaagttgacgtcgggtcatttgaagtgtagagtgaagatggaaaaattgcagttgaagggaacaacctatggcgtctgttcaaaggctttcaagtttcttgggactcccgcagacacaggtcacggcactgtggtgttggaattgcagtacactggcacggacggaccttgcaaagttcctatctcgtcagtggcttcattgaacgacctaacgccagtgggtagattggtcactgtcaacccttttgtttcagtggccacggccaacgctaaggtcctgattgaattggaaccaccctttggagactcatacatagtggtgggcagaggagaacaacagatcaatcatcattggcacaagtctggaagcagcattggcaaagcctttacaaccaccctcaaaggagcgcagagactagccgctctaggagacacagcttgggactttggatcagttggaggggtgttcacctcagttgggaaggctgtccatcaagtgttcggaggagcattccgctcactgttcggaggcatgtcctggataacgcaaggattgctgggggctctcttgttgtggatgggcatcaatgctcgtgataggtccatagctctcacgtttctcgcagttggaggagttctgctcttcctctccgtgaacgtgcatgct

SEQ ID NO: 37 - RNA, 1778 nt, unidentified
  source 1..1778: mol_type = genomic RNA; note = West Nile Virus
ggggaaataagagagaaaagaagagtaagaagaaatataagagccaccatgttcaactgccttggaatgagcaacagagacttcttggaaggagtgtctggagcaacatgggtggatttggttctcgaaggcgacagctgcgtgactatcatgtctaaggacaagcctaccatcgatgtgaagatgatgaatatggaggcggccaacctggcagaggtccgcagttattgctatttggctaccgtcagcgatctctccaccaaagctgcgtgcccgaccatgggagaagctcacaatgacaaacgtgctgacccagcttttgtgtgcagacaaggagtggtggacaggggctggggcaacggctgcggactatttggcaaaggaagcattgacacatgcgccaaatttgcctgctctaccaaggcaataggaagaaccatcttgaaagagaatatcaagtatgaagtggccatttttgtccatgggccaactactgtggagtcgcacggaaactactccacacaggctggagccactcaggcagggagattcagcatcactcctgcggcgccttcatacacactaaagcttggagaatatggagaggtgacagtggactgtgaaccacggtcagggattgacaccaatgcatactacgtgatgactgttggaacaaagacgttcttggtccatcgtgagtggttcatggacctcaacctcccttggagcagtgctggaagtactgtgtggaggaacagagagacgttaatggagtttgaggaaccgcacgccacgaagcagtctgtgatagcattgggctcacaagagggagctctgcatcaagctttggctggagccattcctgtggaattttcaagcaacactgtcaagttgacgtcgggtcatttgaagtgtagagtgaagatggaaaaattgcagttgaagggaacaacctatggcgtctgttcaaaggctttcaagtttcttgggactcccgcagacacaggtcacggcactgtggtgttggaattgcagtacactggcacggacggaccttgcaaagttcctatctcgtcagtggcttcattgaacgacctaacgccagtgggtagattggtcactgtcaacccttttgtttcagtggccacggccaacgctaaggtcctgattgaattggaaccaccctttggagactcatacatagtggtgggcagaggagaacaacagatcaatcatcattggcacaagtctggaagcagcattggcaaagcctttacaaccaccctcaaaggagcgcagagactagccgctctaggagacacagcttgggactttggatcagttggaggggtgttcacctcagttgggaaggctgtccatcaagtgttcggaggagcattccgctcactgttcggaggcatgtcctggataacgcaaggattgctgggggctctcttgttgtggatgggcatcaatgctcgtgataggtccatagctctcacgtttctcgcagttggaggagttctgctcttcctctccgtgaacgtgcatgcttgataataggctggagcctcggtggccatgcttcttgccccttgggcctccccccagcccctcctccccttcctgcacccgtacccccgtggtctttgaataaagtctgagtgggcggcaaaaaaaaaaaaaaaaaaaaaaaaaaaaaaaaaaaaaaaaaaaaaaaaaaaaaaaaaaaaaaaaaaaaaaaaaaaaaaaaaaaaaaaaaaaaaaaaaaaatctag

SEQ ID NO: 38 - RNA, 1557 nt, unidentified
  source 1..1557: mol_type = genomic RNA; note = West Nile Virus
atgcagagagttgtgtttgtcgtgctattgcttttggtggccccagcttacagcttcaactgccttggaatgagcaacagagacttcttggaaggagtgtctggagcaacatgggtggatttggttctcgaaggcgacagctgcgtgactatcatgtctaaggacaagcctaccatcgatgtgaagatgatgaatatggaggcggccaacctggcagaggtccgcagttattgctatttggctaccgtcagcgatctctccaccaaagctgcgtgcccgaccatgggagaagctcacaatgacaaacgtgctgacccagcttttgtgtgcagacaaggagtggtggacaggggctggggcaacggctgcggactatttggcaaaggaagcattgacacatgcgccaaatttgcctgctctaccaaggcaataggaagaaccatcttgaaagagaatatcaagtatgaagtggccatttttgtccatgggccaactactgtggagtcgcacggaaactactccacacaggctggagccactcaggcagggagattcagcatcactcctgcggcgccttcatacacactaaagcttggagaatatggagaggtgacagtggactgtgaaccacggtcagggattgacaccaatgcatactacgtgatgactgttggaacaaagacgttcttggtccatcgtgagtggttcatggacctcaacctcccttggagcagtgctggaagtactgtgtggaggaacagagagacgttaatggagtttgaggaaccgcacgccacgaagcagtctgtgatagcattgggctcacaagagggagctctgcatcaagctttggctggagccattcctgtggaattttcaagcaacactgtcaagttgacgtcgggtcatttgaagtgtagagtgaagatggaaaaattgcagttgaagggaacaacctatggcgtctgttcaaaggctttcaagtttcttgggactcccgcagacacaggtcacggcactgtggtgttggaattgcagtacactggcacggacggaccttgcaaagttcctatctcgtcagtggcttcattgaacgacctaacgccagtgggtagattggtcactgtcaacccttttgtttcagtggccacggccaacgctaaggtcctgattgaattggaaccaccctttggagactcatacatagtggtgggcagaggagaacaacagatcaatcatcattggcacaagtctggaagcagcattggcaaagcctttacaaccaccctcaaaggagcgcagagactagccgctctaggagacacagcttgggactttggatcagttggaggggtgttcacctcagttgggaaggctgtccatcaagtgttcggaggagcattccgctcactgttcggaggcatgtcctggataacgcaaggattgctgggggctctcttgttgtggatgggcatcaatgctcgtgataggtccatagctctcacgtttctcgcagttggaggagttctgctcttcctctccgtgaacgtgcatgct

SEQ ID NO: 39 - RNA, 1829 nt, unidentified
  source 1..1829: mol_type = genomic RNA; note = West Nile Virus
ggggaaataagagagaaaagaagagtaagaagaaatataagagccaccatgcagagagttgtgtttgtcgtgctattgcttttggtggccccagcttacagcttcaactgccttggaatgagcaacagagacttcttggaaggagtgtctggagcaacatgggtggatttggttctcgaaggcgacagctgcgtgactatcatgtctaaggacaagcctaccatcgatgtgaagatgatgaatatggaggcggccaacctggcagaggtccgcagttattgctatttggctaccgtcagcgatctctccaccaaagctgcgtgcccgaccatgggagaagctcacaatgacaaacgtgctgacccagcttttgtgtgcagacaaggagtggtggacaggggctggggcaacggctgcggactatttggcaaaggaagcattgacacatgcgccaaatttgcctgctctaccaaggcaataggaagaaccatcttgaaagagaatatcaagtatgaagtggccatttttgtccatgggccaactactgtggagtcgcacggaaactactccacacaggctggagccactcaggcagggagattcagcatcactcctgcggcgccttcatacacactaaagcttggagaatatggagaggtgacagtggactgtgaaccacggtcagggattgacaccaatgcatactacgtgatgactgttggaacaaagacgttcttggtccatcgtgagtggttcatggacctcaacctcccttggagcagtgctggaagtactgtgtggaggaacagagagacgttaatggagtttgaggaaccgcacgccacgaagcagtctgtgatagcattgggctcacaagagggagctctgcatcaagctttggctggagccattcctgtggaattttcaagcaacactgtcaagttgacgtcgggtcatttgaagtgtagagtgaagatggaaaaattgcagttgaagggaacaacctatggcgtctgttcaaaggctttcaagtttcttgggactcccgcagacacaggtcacggcactgtggtgttggaattgcagtacactggcacggacggaccttgcaaagttcctatctcgtcagtggcttcattgaacgacctaacgccagtgggtagattggtcactgtcaacccttttgtttcagtggccacggccaacgctaaggtcctgattgaattggaaccaccctttggagactcatacatagtggtgggcagaggagaacaacagatcaatcatcattggcacaagtctggaagcagcattggcaaagcctttacaaccaccctcaaaggagcgcagagactagccgctctaggagacacagcttgggactttggatcagttggaggggtgttcacctcagttgggaaggctgtccatcaagtgttcggaggagcattccgctcactgttcggaggcatgtcctggataacgcaaggattgctgggggctctcttgttgtggatgggcatcaatgctcgtgataggtccatagctctcacgtttctcgcagttggaggagttctgctcttcctctccgtgaacgtgcatgcttgataataggctggagcctcggtggccatgcttcttgccccttgggcctccccccagcccctcctccccttcctgcacccgtacccccgtggtctttgaataaagtctgagtgggcggcaaaaaaaaaaaaaaaaaaaaaaaaaaaaaaaaaaaaaaaaaaaaaaaaaaaaaaaaaaaaaaaaaaaaaaaaaaaaaaaaaaaaaaaaaaaaaaaaaaaatctag

SEQ ID NO: 40 - DNA, 92 bp, synthetic construct
  misc_feature 1..92: note = Synthetic Polynucleotide
  source 1..92: mol_type = other DNA
tcaagcttttggaccctcgtacagaagctaatacgactcactatagggaaataagagagaaaagaagagtaagaagaaatataagagccacc

SEQ ID NO: 41 - DNA, 119 bp, synthetic construct
  misc_feature 1..119: note = Synthetic Polynucleotide
  source 1..119: mol_type = other DNA
tgataataggctggagcctcggtggccatgcttcttgccccttgggcctccccccagcccctcctccccttcctgcacccgtacccccgtggtctttgaataaagtctgagtgggcggc

SEQ ID NO: 42 - RNA, 92 nt, synthetic construct
  misc_feature 1..92: note = Synthetic Polynucleotide
  source 1..92: mol_type = other RNA
tcaagcttttggaccctcgtacagaagctaatacgactcactatagggaaataagagagaaaagaagagtaagaagaaatataagagccacc

SEQ ID NO: 43 - RNA, 119 nt, synthetic construct
  misc_feature 1..119: note = Synthetic Polynucleotide
  source 1..119: mol_type = other RNA
tgataataggctggagcctcggtggccatgcttcttgccccttgggcctccccccagcccctcctccccttcctgcacccgtacccccgtggtctttgaataaagtctgagtgggcggc

SEQ ID NO: 44 - protein, 514 aa, unidentified
  source 1..514: note = West Nile Virus
MFNCLGMSNRDFLEGVSGATWVDLVLEGDSCVTIMSKDKPTIDVKMMNMEAANLAEVRSYCYLATVSDLSTKAACPTMGEAHNDKRADPAFVCRQGVVDRGWGNGCGLFGKGSIDTCAKFACSTKAIGRTILKENIKYEVAIFVHGPTTVESHGNYSTQAGATQAGRFSITPAAPSYTLKLGEYGEVTVDCEPRSGIDTNAYYVMTVGTKTFLVHREWFMDLNLPWSSAGSTVWRNRETLMEFEEPHATKQSINVIALGSQEGALHQALAGAIPVEFSSNTVKLTSGHLKCRVKMEKLQLKGTTYGVCSKAFKFLGTPADTGHGTVVLELQYTGTDGPCKVPISSINVASLNDLTPVGRLVTVNPFVSINVATANAKVLIELEPPFGDSYIVVGRGEQQINHHWHKSGSSIGKAFTTTLKGAQRLAALGDTAWDFGSINVGGVFTSINVGKAVHQVFGGAFRSLFGGMSWITQGLLGALLLWMGINARDRSIALTFLAVGGVLLFLSINVNVHA

SEQ ID NO: 45 - protein, 531 aa, unidentified
  source 1..531: note = West Nile Virus
MQRVVFVVLLLLVAPAYSFNCLGMSNRDFLEGVSGATWVDLVLEGDSCVTIMSKDKPTIDVKMMNMEAANLAEVRSYCYLATVSDLSTKAACPTMGEAHNDKRADPAFVCRQGVVDRGWGNGCGLFGKGSIDTCAKFACSTKAIGRTILKENIKYEVAIFVHGPTTVESHGNYSTQAGATQAGRFSITPAAPSYTLKLGEYGEVTVDCEPRSGIDTNAYYVMTVGTKTFLVHREWFMDLNLPWSSAGSTVWRNRETLMEFEEPHATKQSINVIALGSQEGALHQALAGAIPVEFSSNTVKLTSGHLKCRVKMEKLQLKGTTYGVCSKAFKFLGTPADTGHGTVVLELQYTGTDGPCKVPISSINVASLNDLTPVGRLVTVNPFVSINVATANAKVLIELEPPFGDSYIVVGRGEQQINHHWHKSGSSIGKAFTTTLKGAQRLAALGDTAWDFGSINVGGVFTSINVGKAVHQVFGGAFRSLFGGMSWITQGLLGALLLWMGINARDRSIALTFLAVGGVLLFLSINVNVHA

SEQ ID NO: 46 - protein, 695 aa, unidentified
  source 1..695: note = West Nile Virus
MWLVSLAIVTACAGAMKLSNFQGKVMMTVNATDVTDVITIPTAAGKNLCIVRAMDVGYMCDDTITYECPVLSAGNDPEDIDCWCTKSAVYVRYGRCTKTRHSRRSRRSLTVQTHGESTLANKKGAWMDSTKATRYLVKTESWILRNPGYALVAAVIGWMLGSNTMQRVVFVVLLLLVAPAYSFNCLGMSNRDFLEGVSGATWVDLVLEGDSCVTIMSKDKPTIDVKMMNMEAANLAEVRSYCYLATVSDLSTKAACPTMGEAHNDKRADPAFVCRQGVVDRGWGNGCGLFGKGSIDTCAKFACSTKAIGRTILKENIKYEVAIFVHGPTTVESHGNYSTQAGATQAGRFSITPAAPSYTLKLGEYGEVTVDCEPRSGIDTNAYYVMTVGTKTFLVHREWFMDLNLPWSSAGSTVWRNRETLMEFEEPHATKQSINVIALGSQEGALHQALAGAIPVEFSSNTVKLTSGHLKCRVKMEKLQLKGTTYGVCSKAFKFLGTPADTGHGTVVLELQYTGTDGPCKVPISSINVASLNDLTPVGRLVTVNPFVSINVATANAKVLIELEPPFGDSYIVVGRGEQQINHHWHKSGSSIGKAFTTTLKGAQRLAALGDTAWDFGSINVGGVFTSINVGKAVHQVFGGAFRSLFGGMSWITQGLLGALLLWMGINARDRSIALTFLAVGGVLLFLSINVNVHA

SEQ ID NO: 47 - protein, 514 aa, unidentified; identical to SEQ ID NO: 44
  source 1..514: note = West Nile Virus

SEQ ID NO: 48 - DNA, 2586 bp, unidentified
  source 1..2586: mol_type = genomic DNA; note = Eastern equine encephalitis virus
atggatttggacactcatttcacccagtataagttggcacgcccgtatattgctgattgccctaactgtgggcatagtcggtgcgacagccctatagctatagaagaagtcagaggggatgcgcacgcaggagtcatccgcatccagacatcagctatgttcggtctgaagacggatggagtcgatttggcctacatgagtttcatgaacggcaaaacgcagaaatcaataaagatcgacaacctgcatgtgcgcacctcagccccttgttccctcgtgtcgcaccacggctattacatcctggctcaatgcccaccaggggacacggttacagttgggtttcacgacgggcctaaccgccatacgtgcacagttgcccataaggtagaattcaggccagtgggtagagagaaataccgtcacccacctgaacatggagttgaattaccgtgtaaccgttacactcacaagcgtgcagaccaaggacactatgttgagatgcatcaacccgggctagttgccgaccactctctccttagcatccacagtgccaaggtgaaaattacggtaccgagcggcgcccaagtgaaatactactgcaagtgcccagatgtacgagagggaattaccagcagcgaccatacaaccacctgcacggatgtcaaacaatgcagggcttacctgattgacaacaaaaaatgggtgtacaactctggaagactgcctcgaggagagggcgacacttttaaaggaaaacttcatgtgccctttgtgcctgttaaggccaagtgcatcgccacgctggcaccggagcctctagttgagcacaaacaccgcaccctgattttacacctgcacccggaccatccgaccttgctgacgaccaggtcacttggaagtgatgcaaatccaactcgacaatggattgagcgaccaacaactgtcaatttcacagtcaccggagaagggttggagtatacctggggaaaccatccaccaaaaagagtatgggctcaagagtcaggagaagggaatccacatggatggccgcacgaagtggtagtctattactacaacaggtacccgttaaccacaattatcggattatgcacctgtgtggctatcattatggtctcttgtgtcacatccgtgtggctcctttgcaggactcgcaatctttgcataaccccgtataaactagccccgaacgctcaagtcccaatactcctggcgttactctgctgcattaagccgacgagggcatacgaacacacagcagtgatgccgaacaaggtggggatcccgtataaagctttagtcgaacgcccaggttatgcacccgttcacctacagatacagctggttaataccaggataattccatcaaccaacctggagtacatcacctgcaagtacaagacaaaagtgccttctccagtagtgaaatgctgcggtgccactcaatgtacctccaaaccccatcctgactatcagtgtcaggtgtttacaggtgtttacccattcatgtggggaggagcctactgcttctgtgacaccgaaaacacccagatgagcgaggcgtatgtagagcgctcggaagagtgctctattgaccacgcaaaagcttataaagtacacacaggcactgttcaggcaatggtgaacataacttatgggagcgtcagctggagatctgcagatgtctacgtcaatggtgaaactcccgcgaaaataggagatgccaaactcatcataggtccactgtcatctgcgtggtccccattcgataacaaggtggtggtttatgggcatgaagtgtataattacgactttcctgagtacggcaccggcaaagcaggctcttttggagacctgcaatcacgcacatcaaccagcaacgatctgtacgcaaacaccaacttgaagctacaacgaccccaggctggtatcgtacacacacctttcacccaggcgccctctggcttcgaacgatggaaaagggacaaaggggcaccgttgaacgacgtagccccgtttggctgttcgattgccctggagccgctccgtgcagaaaattgtgcagtgggaagcatccctatatctatagatatacccgatgcggctttcaccagaatatctgaaacaccgacagtctcagacctggaatgcaaaattacggagtgtacttatgcctccgacttcggtggtatagccaccgttgcctacaaatccagtaaagcaggaaactgtccaattcattctccatcaggtgttgcagttattaaagagaatgacgttactcttgctgagagcggatcatttacattccacttctccactgcaaacatccatcctgcttttaagctgcaggtctgcactagtgcagttacctgcaaaggagattgtaagccaccgaaagaccacatcgtcgattatccagcacaacataccgaatcctttacgtcggcgatatccgccaccgcgtggtcgtggctaaaagtgctggtaggaggaacatcagcattcattgttctggggcttattgctacagcagtggttgccctagttttgttcttccatagacat

SEQ ID NO: 49 - DNA, 2637 bp, unidentified
  source 1..2637: mol_type = genomic DNA; note = Eastern equine encephalitis virus
atgcagagagttgtgtttgtcgtgctattgcttttggtggccccagcttacagcgatttggacactcatttcacccagtataagttggcacgcccgtatattgctgattgccctaactgtgggcatagtcggtgcgacagccctatagctatagaagaagtcagaggggatgcgcacgcaggagtcatccgcatccagacatcagctatgttcggtctgaagacggatggagtcgatttggcctacatgagtttcatgaacggcaaaacgcagaaatcaataaagatcgacaacctgcatgtgcgcacctcagccccttgttccctcgtgtcgcaccacggctattacatcctggctcaatgcccaccaggggacacggttacagttgggtttcacgacgggcctaaccgccatacgtgcacagttgcccataaggtagaattcaggccagtgggtagagagaaataccgtcacccacctgaacatggagttgaattaccgtgtaaccgttacactcacaagcgtgcagaccaaggacactatgttgagatgcatcaacccgggctagttgccgaccactctctccttagcatccacagtgccaaggtgaaaattacggtaccgagcggcgcccaagtgaaatactactgcaagtgcccagatgtacgagagggaattaccagcagcgaccatacaaccacctgcacggatgtcaaacaatgcagggcttacctgattgacaacaaaaaatgggtgtacaactctggaagactgcctcgaggagagggcgacacttttaaaggaaaacttcatgtgccctttgtgcctgttaaggccaagtgcatcgccacgctggcaccggagcctctagttgagcacaaacaccgcaccctgattttacacctgcacccggaccatccgaccttgctgacgaccaggtcacttggaagtgatgcaaatccaactcgacaatggattgagcgaccaacaactgtcaatttcacagtcaccggagaagggttggagtatacctggggaaaccatccaccaaaaagagtatgggctcaagagtcaggagaagggaatccacatggatggccgcacgaagtggtagtctattactacaacaggtacccgttaaccacaattatcggattatgcacctgtgtggctatcattatggtctcttgtgtcacatccgtgtggctcctttgcaggactcgcaatctttgcataaccccgtataaactagccccgaacgctcaagtcccaatactcctggcgttactctgctgcattaagccgacgagggcatacgaacacacagcagtgatgccgaacaaggtggggatcccgtataaagctttagtcgaacgcccaggttatgcacccgttcacctacagatacagctggttaataccaggataattccatcaaccaacctggagtacatcacctgcaagtacaagacaaaagtgccttctccagtagtgaaatgctgcggtgccactcaatgtacctccaaaccccatcctgactatcagtgtcaggtgtttacaggtgtttacccattcatgtggggaggagcctactgcttctgtgacaccgaaaacacccagatgagcgaggcgtatgtagagcgctcggaagagtgctctattgaccacgcaaaagcttataaagtacacacaggcactgttcaggcaatggtgaacataacttatgggagcgtcagctggagatctgcagatgtctacgtcaatggtgaaactcccgcgaaaataggagatgccaaactcatcataggtccactgtcatctgcgtggtccccattcgataacaaggtggtggtttatgggcatgaagtgtataattacgactttcctgagtacggcaccggcaaagcaggctcttttggagacctgcaatcacgcacatcaaccagcaacgatctgtacgcaaacaccaacttgaagctacaacgaccccaggctggtatcgtacacacacctttcacccaggcgccctctggcttcgaacgatggaaaagggacaaaggggcaccgttgaacgacgtagccccgtttggctgttcgattgccctggagccgctccgtgcagaaaattgtgcagtgggaagcatccctatatctatagatatacccgatgcggctttcaccagaatatctgaaacaccgacagtctcagacctggaatgcaaaattacggagtgtacttatgcctccgacttcggtggtatagccaccgttgcctacaaatccagtaaagcaggaaactgtccaattcattctccatcaggtgttgcagttattaaagagaatgacgttactcttgctgagagcggatcatttacattccacttctccactgcaaacatccatcctgcttttaagctgcaggtctgcactagtgcagttacctgcaaaggagattgtaagccaccgaaagaccacatcgtcgattatccagcacaacataccgaatcctttacgtcggcgatatccgccaccgcgtggtcgtggctaaaagtgctggtaggaggaacatcagcattcattgttctggggcttattgctacagcagtggttgccctagttttgttcttccatagacat

SEQ ID NO: 50 - RNA, 2586 nt, unidentified
  source 1..2586: mol_type = genomic RNA; note = Eastern equine encephalitis virus
atggatttggacactcatttcacccagtataagttggcacgcccgtatattgctgattgccctaactgtgggcatagtcggtgcgacagccctatagctatagaagaagtcagaggggatgcgcacgcaggagtcatccgcatccagacatcagctatgttcggtctgaagacggatggagtcgatttggcctacatgagtttcatgaacggcaaaacgcagaaatcaataaagatcgacaacctgcatgtgcgcacctcagccccttgttccctcgtgtcgcaccacggctattacatcctggctcaatgcccaccaggggacacggttacagttgggtttcacgacgggcctaaccgccatacgtgcacagttgcccataaggtagaattcaggccagtgggtagagagaaataccgtcacccacctgaacatggagttgaattaccgtgtaaccgttacactcacaagcgtgcagaccaaggacactatgttgagatgcatcaacccgggctagttgccgaccactctctccttagcatccacagtgccaaggtgaaaattacggtaccgagcggcgcccaagtgaaatactactgcaagtgcccagatgtacgagagggaattaccagcagcgaccatacaaccacctgcacggatgtcaaacaatgcagggcttacctgattgacaacaaaaaatgggtgtacaactctggaagactgcctcgaggagagggcgacacttttaaaggaaaacttcatgtgccctttgtgcctgttaaggccaagtgcatcgccacgctggcaccggagcctctagttgagcacaaacaccgcaccctgattttacacctgcacccggaccatccgaccttgctgacgaccaggtcacttggaagtgatgcaaatccaactcgacaatggattgagcgaccaacaactgtcaatttcacagtcaccggagaagggttggagtatacctggggaaaccatccaccaaaaagagtatgggctcaagagtcaggagaagggaatccacatggatggccgcacgaagtggtagtctattactacaacaggtacccgttaaccacaattatcggattatgcacctgtgtggctatcattatggtctcttgtgtcacatccgtgtggctcctttgcaggactcgcaatctttgcataaccccgtataaactagccccgaacgctcaagtcccaatactcctggcgttactctgctgcattaagccgacgagggcatacgaacacacagcagtgatgccgaacaaggtggggatcccgtataaagctttagtcgaacgcccaggttatgcacccgttcacctacagatacagctggttaataccaggataattccatcaaccaacctggagtacatcacctgcaagtacaagacaaaagtgccttctccagtagtgaaatgctgcggtgccactcaatgtacctccaaaccccatcctgactatcagtgtcaggtgtttacaggtgtttacccattcatgtggggaggagcctactgcttctgtgacaccgaaaacacccagatgagcgaggcgtatgtagagcgctcggaagagtgctctattgaccacgcaaaagcttataaagtacacacaggcactgttcaggcaatggtgaacataacttatgggagcgtcagctggagatctgcagatgtctacgtcaatggtgaaactcccgcgaaaataggagatgccaaactcatcataggtccactgtcatctgcgtggtccccattcgataacaaggtggtggtttatgggcatgaagtgtataattacgactttcctgagtacggcaccggcaaagcaggctcttttggagacctgcaatcacgcacatcaaccagcaacgatctgtacgcaaacaccaacttgaagctacaacgaccccaggctggtatcgtacacacacctttcacccaggcgccctctggcttcgaacgatggaaaagggacaaaggggcaccgttgaacgacgtagccccgtttggctgttcgattgccctggagccgctccgtgcagaaaattgtgcagtgggaagcatccctatatctatagatatacccgatgcggctttcaccagaatatctgaaacaccgacagtctcagacctggaatgcaaaattacggagtgtacttatgcctccgacttcggtggtatagccaccgttgcctacaaatccagtaaagcaggaaactgtccaattcattctccatcaggtgttgcagttattaaagagaatgacgttactcttgctgagagcggatcatttacattccacttctccactgcaaacatccatcctgcttttaagctgcaggtctgcactagtgcagttacctgcaaaggagattgtaagccaccgaaagaccacatcgtcgattatccagcacaacataccgaatcctttacgtcggcgatatccgccaccgcgtggtcgtggctaaaagtgctggtaggaggaacatcagcattcattgttctggggcttattgctacagcagtggttgccctagttttgttcttccatagacat

SEQ ID NO: 51 - RNA, 2637 nt, unidentified
  source 1..2637: mol_type = genomic RNA; note = Eastern equine encephalitis virus
atgcagagagttgtgtttgtcgtgctattgcttttggtggccccagcttacagcgatttggacactcatttcacccagtataagttggcacgcccgtatattgctgattgccctaactgtgggcatagtcggtgcgacagccctatagctatagaagaagtcagaggggatgcgcacgcaggagtcatccgcatccagacatcagctatgttcggtctgaagacggatggagtcgatttggcctacatgagtttcatgaacggcaaaacgcagaaatcaataaagatcgacaacctgcatgtgcgcacctcagccccttgttccctcgtgtcgcaccacggctattacatcctggctcaatgcccaccaggggacacggttacagttgggtttcacgacgggcctaaccgccatacgtgcacagttgcccataaggtagaattcaggccagtgggtagagagaaataccgtcacccacctgaacatggagttgaattaccgtgtaaccgttacactcacaagcgtgcagaccaaggacactatgttgagatgcatcaacccgggctagttgccgaccactctctccttagcatccacagtgccaaggtgaaaattacggtaccgagcggcgcccaagtgaaatactactgcaagtgcccagatgtacgagagggaattaccagcagcgaccatacaaccacctgcacggatgtcaaacaatgcagggcttacctgattgacaacaaaaaatgggtgtacaactctggaagactgcctcgaggagagggcgacacttttaaaggaaaacttcatgtgccctttgtgcctgttaaggccaagtgcatcgccacgctggcaccggagcctctagttgagcacaaacaccgcaccctgattttacacctgcacccggaccatccgaccttgctgacgaccaggtcacttggaagtgatgcaaatccaactcgacaatggattgagcgaccaacaactgtcaatttcacagtcaccggagaagggttggagtatacctggggaaaccatccaccaaaaagagtatgggctcaagagtcaggagaagggaatccacatggatggccgcacgaagtggtagtctattactacaacaggtacccgttaaccacaattatcggattatgcacctgtgtggctatcattatggtctcttgtgtcacatccgtgtggctcctttgcaggactcgcaatctttgcataaccccgtataaactagccccgaacgctcaagtcccaatactcctggcgttactctgctgcattaagccgacgagggcatacgaacacacagcagtgatgccgaacaaggtggggatcccgtataaagctttagtcgaacgcccaggttatgcacccgttcacctacagatacagctggttaataccaggataattccatcaaccaacctggagtacatcacctgcaagtacaagacaaaagtgccttctccagtagtgaaatgctgcggtgccactcaatgtacctccaaaccccatcctgactatcagtgtcaggtgtttacaggtgtttacccattcatgtggggaggagcctactgcttctgtgacaccgaaaacacccagatgagcgaggcgtatgtagagcgctcggaagagtgctctattgaccacgcaaaagcttataaagtacacacaggcactgttcaggcaatggtgaacataacttatgggagcgtcagctggagatctgcagatgtctacgtcaatggtgaaactcccgcgaaaataggagatgccaaactcatcataggtccactgtcatctgcgtggtccccattcgataacaaggtggtggtttatgggcatgaagtgtataattacgactttcctgagtacggcaccggcaaagcaggctcttttggagacctgcaatcacgcacatcaaccagcaacgatctgtacgcaaacaccaacttgaagctacaacgaccccaggctggtatcgtacacacacctttcacccaggcgccctctggcttcgaacgatggaaaagggacaaaggggcaccgttgaacgacgtagccccgtttggctgttcgattgccctggagccgctccgtgcagaaaattgtgcagtgggaagcatccctatatctatagatatacccgatgcggctttcaccagaatatctgaaacaccgacagtctcagacctggaatgcaaaattacggagtgtacttatgcctccgacttcggtggtatagccaccgttgcctacaaatccagtaaagcaggaaactgtccaattcattctccatcaggtgttgcagttattaaagagaatgacgttactcttgctgagagcggatcatttacattccacttctccactgcaaacatccatcctgcttttaagctgcaggtctgcactagtgcagttacctgcaaaggagattgtaagccaccgaaagaccacatcgtcgattatccagcacaacataccgaatcctttacgtcggcgatatccgccaccgcgtggtcgtggctaaaagtgctggtaggaggaacatcagcattcattgttctggggcttattgctacagcagtggttgccctagttttgttcttccatagacat

SEQ ID NO: 52 - protein, 866 aa, unidentified
  source 1..866: note = Eastern equine encephalitis virus
MDLDTHFTQYKLARPYIADCPNCGHSRCDSPIAIEEVRGDAHAGVIRIQTSAMFGLKTDGVDLAYMSFMNGKTQKSIKIDNLHVRTSAPCSLVSHHGYYILAQCPPGDTVTVGFHDGPNRHTCTVAHKVEFRPVGREKYRHPPEHGVELPCNRYTHKRADQGHYVEMHQPGLVADHSLLSIHSAKVKITVPSGAQVKYYCKCPDVREGITSSDHTTTCTDVKQCRAYLIDNKKWVYNSGRLPRGEGDTFKGKLHVPFVPVKAKCIATLAPEPLVEHKHRTLILHLHPDHPTLLTTRSLGSDANPTRQWIERPTTVNFTVTGEGLEYTWGNHPPKRVWAQESGEGNPHGWPHEVVVYYYNRYPLTTIIGLCTCVAIIMVSCVTSINVWLLCRTRNLCITPYKLAPNAQVPILLALLCCIKPTRAYEHTAVMPNKVGIPYKALVERPGYAPVHLQIQLVNTRIIPSTNLEYITCKYKTKVPSPVVKCCGATQCTSKPHPDYQCQVFTGVYPFMWGGAYCFCDTENTQMSEAYVERSEECSIDHAKAYKVHTGTVQAMVNITYGSINVSWRSADVYVNGETPAKIGDAKLIIGPLSSAWSPFDNKVVVYGHEVYNYDFPEYGTGKAGSFGDLQSRTSTSNDLYANTNLKLQRPQAGIVHTPFTQAPSGFERWKRDKGAPLNDVAPFGCSIALEPLRAENCAVGSIPISIDIPDAAFTRISETPTVSDLECKITECTYASDFGGIATVAYKSSKAGNCPIHSPSGVAVIKENDVTLAESGSFTFHFSTANIHPAFKLQVCTSAVTCKGDCKPPKDHIVDYPAQHTESFTSAISATAWSWLKVLVGGTSAFIVLGLIATAVVALVLFFHRH

SEQ ID NO: 53 - protein, 883 aa, unidentified
  source 1..883: note = Eastern equine encephalitis virus
MQRVVFVVLLLLVAPAYSDLDTHFTQYKLARPYIADCPNCGHSRCDSPIAIEEVRGDAHAGVIRIQTSAMFGLKTDGVDLAYMSFMNGKTQKSIKIDNLHVRTSAPCSLVSHHGYYILAQCPPGDTVTVGFHDGPNRHTCTVAHKVEFRPVGREKYRHPPEHGVELPCNRYTHKRADQGHYVEMHQPGLVADHSLLSIHSAKVKITVPSGAQVKYYCKCPDVREGITSSDHTTTCTDVKQCRAYLIDNKKWVYNSGRLPRGEGDTFKGKLHVPFVPVKAKCIATLAPEPLVEHKHRTLILHLHPDHPTLLTTRSLGSDANPTRQWIERPTTVNFTVTGEGLEYTWGNHPPKRVWAQESGEGNPHGWPHEVVVYYYNRYPLTTIIGLCTCVAIIMVSCVTSINVWLLCRTRNLCITPYKLAPNAQVPILLALLCCIKPTRAYEHTAVMPNKVGIPYKALVERPGYAPVHLQIQLVNTRIIPSTNLEYITCKYKTKVPSPVVKCCGATQCTSKPHPDYQCQVFTGVYPFMWGGAYCFCDTENTQMSEAYVERSEECSIDHAKAYKVHTGTVQAMVNITYGSINVSWRSADVYVNGETPAKIGDAKLIIGPLSSAWSPFDNKVVVYGHEVYNYDFPEYGTGKAGSFGDLQSRTSTSNDLYANTNLKLQRPQAGIVHTPFTQAPSGFERWKRDKGAPLNDVAPFGCSIALEPLRAENCAVGSIPISIDIPDAAFTRISETPTVSDLECKITECTYASDFGGIATVAYKSSKAGNCPIHSPSGVAVIKENDVTLAESGSFTFHFSTANIHPAFKLQVCTSAVTCKGDCKPPKDHIVDYPAQHTESFTSAISATAWSWLKVLVGGTSAFIVLGLIATAVVALVLFFHRH

SEQ ID NO: 54 - protein, 866 aa, unidentified; identical to SEQ ID NO: 52
  source 1..866: note = Eastern equine encephalitis virus

SEQ ID NO: 55 - DNA, 2586 bp, unidentified
  source 1..2586: mol_type = genomic DNA; note = Sindbis Virus
atggatgtggacgctcactttacccagtataaattagcccgcccgtatatagccgactgcccaaattgcggtcatggcagatgtgacagtccgatcgctatcgaggacgtgcgcggagacgcgcacgccggttacatccgcatacagacatccgcaatgttcggcatgaagtcggaaggggttgatctggcttacatgagctatatgaacggaaaggttttaaaagccatcaagattgatagcctgtacgtccgtacatcagcaccttgttctctggtttcttatcacggatactacctcctcgcgcagtgcccaccaggagatactgtaacagtagggttcctagaaggtacccacaagtatatgtgtacagtagcgcaccaggtaaaatttaacccggtggggagagagaaatacagacatccaccagaacacggtgttgaactaccctgcaacaaatacacccataagcgtgccgatcaaggccattatgtagaaatgcaccaaccgggtatggtcgccgaccacactctgttgagcatgagcggcaccaaggtgaaagtcaccgcaccgagcagttcgcaagtgaaatattactgcaaatgtccagatcttcaagaaggaactaccagcggtgaacacacaacaacatgtaccgatgttaagcaatgccgagcgtatctgattgacaacaggaagtgggtgtacaactcaggaaaattacctagaggagaaggcgaaacctttaaaggcaaactccatgtaccatttgtacctgttgcggccacctgcacagcgacccttgctccagagcctctcgtcgagcacaagcaccgctccctgatcctccacttgcatccagagcaccccacgctattgacaacaagggcgctcggaagtcaagcacaaccgactaggcaatggatagaccgcccaaccaccgtcaacttcacagttaccggagaaggttttgaatatacctggggcaaccatcccccgaaaagagtatgggcccaagagtcaggagaaggcaacccgcacggctggcctcacgaggtggtaatctactactacaataggtacccgatgacaactatcgtgggattatgcacgtgtgccgctattattatggtgtcatgcgttacatctgtatggcttttatgccgcacccgtaacctttgcataacaccctacagattggcaccaaatgcccacgtacctctcttagtagcgttgctgtgctgcgttaaaccaactagagcatacgagcacacggctgtgatgtcgaacaaggtggggatcccttacaaagccctagttgaaaggccagggtacgcacccgtacatctccagatccagctggtaagcacaaaaataatccctacagcgaacttggaatacattacctgtaaatataagactaaggtgccttccccagtagtaaaatgttgcggatccacccaatgtacgtctaaacaatacccagactatcagtgccaagtcttcacgggagtctacccatttatgtggggaggagcctactgtttctgtgatactgaaaatacacaaatgagcgaagcgtatgtcgaacgctcagaagaatgctcagtggaccaggccaaagcctacaaagtacacacaggaacggtgcaggctgtagttaatatcacctacgggggcgtcagctggagatctgccgacgtctatgtcaacggagagacccctgccaaaataggtgatgctaaactaactataggccctctctcttccgcatggtcaccttttgactctaaagtcatagtgtacgggcacgaggtgtataactatgactttcccgaatacggtaccggcaaagccggttcgttcggagacttgcaatccaggacacttacaagtaaggacttgtactctaacaccaatttgaaactgcaacgtccccagccaggagtggtccacaccccatacacccaggcaccctcggggtttgaacgttggaagaaagatcgaggggcaccgctaaacgacgtcgctccttttggatgcaacatagccctggaaccactgcgtgctgagaactgtgcggtggggagtatccctctctccatcgacatacccgatgccgcttttaccaggatatcggagacaccgactgtctccgatctggaatgtaaaattactgagtgcacgtatgcgtcagattttgggggaatagctactatgtcgtataaagctagcaaggcaggaaactgccctattcattccccttcgggcattgcagtaattaaagagaacgatgttattctttctggaagcggctcgttcacgttccatttttcaacagcgagcatccacccagcgttcaagatgcaggtatgcaccagcgtagtcacctgcaaaggtgactgcaagccacctaaggaccatatcgtcgattacccagcccagcatactgagacgtttacatcagcagtttccgcaactgcatggtcatggctgaaagtgctagttgggggcacatccgtctttatcattcttgggctaatcgctacagcagtggttgccctggtgctattcacccacaaacac

SEQ ID NO: 56 - DNA, 2637 bp, unidentified
  source 1..2637: mol_type = genomic DNA; note = Sindbis Virus
atgcagagagttgtgtttgtcgtgctattgcttttggtggccccagcttacagcgatgtggacgctcactttacccagtataaattagcccgcccgtatatagccgactgcccaaattgcggtcatggcagatgtgacagtccgatcgctatcgaggacgtgcgcggagacgcgcacgccggttacatccgcatacagacatccgcaatgttcggcatgaagtcggaaggggttgatctggcttacatgagctatatgaacggaaaggttttaaaagccatcaagattgatagcctgtacgtccgtacatcagcaccttgttctctggtttcttatcacggatactacctcctcgcgcagtgcccaccaggagatactgtaacagtagggttcctagaaggtacccacaagtatatgtgtacagtagcgcaccaggtaaaatttaacccggtggggagagagaaatacagacatccaccagaacacggtgttgaactaccctgcaacaaatacacccataagcgtgccgatcaaggccattatgtagaaatgcaccaaccgggtatggtcgccgaccacactctgttgagcatgagcggcaccaaggtgaaagtcaccgcaccgagcagttcgcaagtgaaatattactgcaaatgtccagatcttcaagaaggaactaccagcggtgaacacacaacaacatgtaccgatgttaagcaatgccgagcgtatctgattgacaacaggaagtgggtgtacaactcaggaaaattacctagaggagaaggcgaaacctttaaaggcaaactccatgtaccatttgtacctgttgcggccacctgcacagcgacccttgctccagagcctctcgtcgagcacaagcaccgctccctgatcctccacttgcatccagagcaccccacgctattgacaacaagggcgctcggaagtcaagcacaaccgactaggcaatggatagaccgcccaaccaccgtcaacttcacagttaccggagaaggttttgaatatacctggggcaaccatcccccgaaaagagtatgggcccaagagtcaggagaaggcaacccgcacggctggcctcacgaggtggtaatctactactacaataggtacccgatgacaactatcgtgggattatgcacgtgtgccgctattattatggtgtcatgcgttacatctgtatggcttttatgccgcacccgtaacctttgcataacaccctacagattggcaccaaatgcccacgtacctctcttagtagcgttgctgtgctgcgttaaaccaactagagcatacgagcacacggctgtgatgtcgaacaaggtggggatcccttacaaagccctagttgaaaggccagggtacgcacccgtacatctccagatccagctggtaagcacaaaaataatccctacagcgaacttggaatacattacctgtaaatataagactaaggtgccttccccagtagtaaaatgttgcggatccacccaatgtacgtctaaacaatacccagactatcagtgccaagtcttcacgggagtctacccatttatgtggggaggagcctactgtttctgtgatactgaaaatacacaaatgagcgaagcgtatgtcgaacgctcagaagaatgctcagtggaccaggccaaagcctacaaagtacacacaggaacggtgcaggctgtagttaatatcacctacgggggcgtcagctggagatctgccgacgtctatgtcaacggagagacccctgccaaaataggtgatgctaaactaactataggccctctctcttccgcatggtcaccttttgactctaaagtcatagtgtacgggcacgaggtgtataactatgactttcccgaatacggtaccggcaaagccggttcgttcggagacttgcaatccaggacacttacaagtaaggacttgtactctaacaccaatttgaaactgcaacgtccccagccaggagtggtccacaccccatacacccaggcaccctcggggtttgaacgttggaagaaagatcgaggggcaccgctaaacgacgtcgctccttttggatgcaacatagccctggaaccactgcgtgctgagaactgtgcggtggggagtatccctctctccatcgacatacccgatgccgcttttaccaggatatcggagacaccgactgtctccgatctggaatgtaaaattactgagtgcacgtatgcgtcagattttgggggaatagctactatgtcgtataaagctagcaaggcaggaaactgccctattcattccccttcgggcattgcagtaattaaagagaacgatgttattctttctggaagcggctcgttcacgttccatttttcaacagcgagcatccacccagcgttcaagatgcaggtatgcaccagcgtagtcacctgcaaaggtgactgcaagccacctaaggaccatatcgtcgattacccagcccagcatactgagacgtttacatcagcagtttccgcaactgcatggtcatggctgaaagtgctagttgggggcacatccgtctttatcattcttgggctaatcgctacagcagtggttgccctggtgctattcacccacaaacac

SEQ ID NO: 57 - RNA, 2586 nt, unidentified
  source 1..2586: mol_type = genomic RNA; note = Sindbis Virus
atggatgtggacgctcactttacccagtataaattagcccgcccgtatatagccgactgcccaaattgcggtcatggcagatgtgacagtccgatcgctatcgaggacgtgcgcggagacgcgcacgccggttacatccgcatacagacatccgcaatgttcggcatgaagtcggaaggggttgatctggcttacatgagctatatgaacggaaaggttttaaaagccatcaagattgatagcctgtacgtccgtacatcagcaccttgttctctggtttcttatcacggatactacctcctcgcgcagtgcccaccaggagatactgtaacagtagggttcctagaaggtacccacaagtatatgtgtacagtagcgcaccaggtaaaatttaacccggtggggagagagaaatacagacatccaccagaacacggtgttgaactaccctgcaacaaatacacccataagcgtgccgatcaaggccattatgtagaaatgcaccaaccgggtatggtcgccgaccacactctgttgagcatgagcggcaccaaggtgaaagtcaccgcaccgagcagttcgcaagtgaaatattactgcaaatgtccagatcttcaagaaggaactaccagcggtgaacacacaacaacatgtaccgatgttaagcaatgccgagcgtatctgattgacaacaggaagtgggtgtacaactcaggaaaattacctagaggagaaggcgaaacctttaaaggcaaactccatgtaccatttgtacctgttgcggccacctgcacagcgacccttgctccagagcctctcgtcgagcacaagcaccgctccctgatcctccacttgcatccagagcaccccacgctattgacaacaagggcgctcggaagtcaagcacaaccgactaggcaatggatagaccgcccaaccaccgtcaacttcacagttaccggagaaggttttgaatatacctggggcaaccatcccccgaaaagagtatgggcccaagagtcaggagaaggcaacccgcacggctggcctcacgaggtggtaatctactactacaataggtacccgatgacaactatcgtgggattatgcacgtgtgccgctattattatggtgtcatgcgttacatctgtatggcttttatgccgcacccgtaacctttgcataacaccctacagattggcaccaaatgcccacgtacctctcttagtagcgttgctgtgctgcgttaaaccaactagagcatacgagcacacggctgtgatgtcgaacaaggtggggatcccttacaaagccctagttgaaaggccagggtacgcacccgtacatctccagatccagctggtaagcacaaaaataatccctacagcgaacttggaatacattacctgtaaatataagactaaggtgccttccccagtagtaaaatgttgcggatccacccaatgtacgtctaaacaatacccagactatcagtgccaagtcttcacgggagtctacccatttatgtggggaggagcctactgtttctgtgatactgaaaatacacaaatgagcgaagcgtatgtcgaacgctcagaagaatgctcagtggaccaggccaaagcctacaaagtacacacaggaacggtgcaggctgtagttaatatcacctacgggggcgtcagctggagatctgccgacgtctatgtcaacggagagacccctgccaaaataggtgatgctaaactaactataggccctctctcttccgcatggtcaccttttgactctaaagtcatagtgtacgggcacgaggtgtataactatgactttcccgaatacggtaccggcaaagccggttcgttcggagacttgcaatccaggacacttacaagtaaggacttgtactctaacaccaatttgaaactgcaacgtccccagccaggagtggtccacaccccatacacccaggcaccctcggggtttgaacgttggaagaaagatcgaggggcaccgctaaacgacgtcgctccttttggatgcaacatagccctggaaccactgcgtgctgagaactgtgcggtggggagtatccctctctccatcgacatacccgatgccgcttttaccaggatatcggagacaccgactgtctccgatctggaatgtaaaattactgagtgcacgtatgcgtcagattttgggggaatagctactatgtcgtataaagctagcaaggcaggaaactgccctattcattccccttcgggcattgcagtaattaaagagaacgatgttattctttctggaagcggctcgttcacgttccatttttcaacagcgagcatccacccagcgttcaagatgcaggtatgcaccagcgtagtcacctgcaaaggtgactgcaagccacctaaggaccatatcgtcgattacccagcccagcatactgagacgtttacatcagcagtttccgcaactgcatggtcatggctgaaagtgctagttgggggcacatccgtctttatcattcttgggctaatcgctacagcagtggttgccctggtgctattcacccacaaacac

SEQ ID NO: 58 - RNA, 2637 nt, unidentified
  source 1..2637: mol_type = genomic RNA; note = Sindbis Virus
atgcagagagttgtgtttgtcgtgctattgcttttggtggccccagcttacagcgatgtggacgctcactttacccagtataaattagcccgcccgtatatagccgactgcccaaattgcggtcatggcagatgtgacagtccgatcgctatcgaggacgtgcgcggagacgcgcacgccggttacatccgcatacagacatccgcaatgttcggcatgaagtcggaaggggttgatctggcttacatgagctatatgaacggaaaggttttaaaagccatcaagattgatagcctgtacgtccgtacatcagcaccttgttctctggtttcttatcacggatactacctcctcgcgcagtgcccaccaggagatactgtaacagtagggttcctagaaggtacccacaagtatatgtgtacagtagcgcaccaggtaaaatttaacccggtggggagagagaaatacagacatccaccagaacacggtgttgaactaccctgcaacaaatacacccataagcgtgccgatcaaggccattatgtagaaatgcaccaaccgggtatggtcgccgaccacactctgttgagcatgagcggcaccaaggtgaaagtcaccgcaccgagcagttcgcaagtgaaatattactgcaaatgtccagatcttcaagaaggaactaccagcggtgaacacacaacaacatgtaccgatgttaagcaatgccgagcgtatctgattgacaacaggaagtgggtgtacaactcaggaaaattacctagaggagaaggcgaaacctttaaaggcaaactccatgtaccatttgtacctgttgcggccacctgcacagcgacccttgctccagagcctctcgtcgagcacaagcaccgctccctgatcctccacttgcatccagagcaccccacgctattgacaacaagggcgctcggaagtcaagcacaaccgactaggcaatggatagaccgcccaaccaccgtcaacttcacagttaccggagaaggttttgaatatacctggggcaaccatcccccgaaaagagtatgggcccaagagtcaggagaaggcaacccgcacggctggcctcacgaggtggtaatctactactacaataggtacccgatgacaactatcgtgggattatgcacgtgtgccgctattattatggtgtcatgcgttacatctgtatggcttttatgccgcacccgtaacctttgcataacaccctacagattggcaccaaatgcccacgtacctctcttagtagcgttgctgtgctgcgttaaaccaactagagcatacgagcacacggctgtgatgtcgaacaaggtggggatcccttacaaagccctagttgaaaggccagggtacgcacccgtacatctccagatccagctggtaagcacaaaaataatccctacagcgaacttggaatacattacctgtaaatataagactaaggtgccttccccagtagtaaaatgttgcggatccacccaatgtacgtctaaacaatacccagactatcagtgccaagtcttcacgggagtctacccatttatgtggggaggagcctactgtttctgtgatactgaaaatacacaaatgagcgaagcgtatgtcgaacgctcagaagaatgctcagtggaccaggccaaagcctacaaagtacacacaggaacggtgcaggctgtagttaatatcacctacgggggcgtcagctggagatctgccgacgtctatgtcaacggagagacccctgccaaaataggtgatgctaaactaactataggccctctctcttccgcatggtcaccttttgactctaaagtcatagtgtacgggcacgaggtgtataactatgactttcccgaatacggtaccggcaaagccggttcgttcggagacttgcaatccaggacacttacaagtaaggacttgtactctaacaccaatttgaaactgcaacgtccccagccaggagtggtccacaccccatacacccaggcaccctcggggtttgaacgttggaagaaagatcgaggggcaccgctaaacgacgtcgctccttttggatgcaacatagccctggaaccactgcgtgctgagaactgtgcggtggggagtatccctctctccatcgacatacccgatgccgcttttaccaggatatcggagacaccgactgtctccgatctggaatgtaaaattactgagtgcacgtatgcgtcagattttgggggaatagctactatgtcgtataaagctagcaaggcaggaaactgccctattcattccccttcgggcattgcagtaattaaagagaacgatgttattctttctggaagcggctcgttcacgttccatttttcaacagcgagcatccacccagcgttcaagatgcaggtatgcaccagcgtagtcacctgcaaaggtgactgcaagccacctaaggaccatatcgtcgattacccagcccagcatactgagacgtttacatcagcagtttccgcaactgcatggtcatggctgaaagtgctagttgggggcacatccgtctttatcattcttgggctaatcgctacagcagtggttgccctggtgctattcacccacaaacac

SEQ ID NO: 59 - protein, 870 aa, unidentified
  source 1..870: note = Sindbis Virus
MDVDAHFTQYKLARPYIADCPNCGHGRCDSPIAIEDVRGDAHAGYIRIQTSAMFGMKSEGVDLAYMSYMNGKVLKAIKIDSLYVRTSAPCSLVSYHGYYLLAQCPPGDTVTVGFLEGTHKYMCTVAHQVKFNPVGREKYRHPPEHGVELPCNKYTHKRADQGHYVEMHQPGMVADHTLLSMSGTKVKVTAPSSSQVKYYCKCPDLQEGTTSGEHTTTCTDVKQCRAYLIDNRKWVYNSGKLPRGEGETFKGKLHVPFVPVAATCTATLAPEPLVEHKHRSLILHLHPEHPTLLTTRALGSQAQPTRQWIDRPTTVNFTVTGEGFEYTWGNHPPKRVWAQESGEGNPHGWPHEVVIYYYNRYPMTTIVGLCTCAAIIMVSCVTSINVWLLCRTRNLCITPYRLAPNAHVPLLVALLCCVKPTRAYEHTAVMSNKVGIPYKALVERPGYAPVHLQIQLVSTKIIPTANLEYITCKYKTKVPSPVVKCCGSTQCTSKQYPDYQCQVFTGVYPFMWGGAYCFCDTENTQMSEAYVERSEECSINVDQAKAYKVHTGTVQAVVNITYGGVSWRSADVYVNGETPAKIGDAKLTIGPLSSAWSPFDSKVIVYGHEVYNYDFPEYGTGKAGSFGDLQSRTLTSKDLYSNTNLKLQRPQPGVVHTPYTQAPSGFERWKKDRGAPLNDVAPFGCNIALEPLRAENCAVGSIPLSIDIPDAAFTRISETPTVSDLECKITECTYASDFGGIATMSYKASKAGNCPIHSPSGIAVIKENDVILSGSGSFTFHFSTASIHPAFKMQVCTSINVVTCKGDCKPPKDHIVDYPAQHTETFTSAVSATAWSWLKVLVGGTSINVFIILGLIATAVVALVLFTHKH

SEQ ID NO: 60 - protein, 887 aa, unidentified
  source 1..887: note = Sindbis Virus
MQRVVFVVLLLLVAPAYSDVDAHFTQYKLARPYIADCPNCGHGRCDSPIAIEDVRGDAHAGYIRIQTSAMFGMKSEGVDLAYMSYMNGKVLKAIKIDSLYVRTSAPCSLVSYHGYYLLAQCPPGDTVTVGFLEGTHKYMCTVAHQVKFNPVGREKYRHPPEHGVELPCNKYTHKRADQGHYVEMHQPGMVADHTLLSMSGTKVKVTAPSSSQVKYYCKCPDLQEGTTSGEHTTTCTDVKQCRAYLIDNRKWVYNSGKLPRGEGETFKGKLHVPFVPVAATCTATLAPEPLVEHKHRSLILHLHPEHPTLLTTRALGSQAQPTRQWIDRPTTVNFTVTGEGFEYTWGNHPPKRVWAQESGEGNPHGWPHEVVIYYYNRYPMTTIVGLCTCAAIIMVSCVTSINVWLLCRTRNLCITPYRLAPNAHVPLLVALLCCVKPTRAYEHTAVMSNKVGIPYKALVERPGYAPVHLQIQLVSTKIIPTANLEYITCKYKTKVPSPVVKCCGSTQCTSKQYPDYQCQVFTGVYPFMWGGAYCFCDTENTQMSEAYVERSEECSINVDQAKAYKVHTGTVQAVVNITYGGVSWRSADVYVNGETPAKIGDAKLTIGPLSSAWSPFDSKVIVYGHEVYNYDFPEYGTGKAGSFGDLQSRTLTSKDLYSNTNLKLQRPQPGVVHTPYTQAPSGFERWKKDRGAPLNDVAPFGCNIALEPLRAENCAVGSIPLSIDIPDAAFTRISETPTVSDLECKITECTYASDFGGIATMSYKASKAGNCPIHSPSGIAVIKENDVILSGSGSFTFHFSTASIHPAFKMQVCTSINVVTCKGDCKPPKDHIVDYPAQHTETFTSAVSATAWSWLKVLVGGTSINVFIILGLIATAVVALVLFTHKH

SEQ ID NO: 61 - protein, 139 aa, unidentified
  source 1..139: note = Sindbis Virus
KPPSGKNITYECKCGDYKTATVSINVRTEIAGCTAIKQCVAYKSDQTKWVFNSPDLIRHADHTAQGKLHLPFKPTLSTCLVPLAHEPTVTHGFKHISLHLDTDHPTLLTTRRLGEKPEPTSEWISGKTVRNFTVDRDGL

SEQ ID NO: 62 - protein, 887 aa, unidentified; identical to SEQ ID NO: 60
  source 1..887: note = Sindbis Virus

SEQ ID NO: 63 - protein, 870 aa, unidentified; identical to SEQ ID NO: 59
  source 1..870: note = Sindbis Virus

SEQ ID NO: 64 - protein, 1271 aa, unidentified
  source 1..1271: note = Venezuelan equine encephalitis virus
MFPFQPMYPMQPMPYRNPFAAPRRPWFPRTDPFLAMQVQELTRSMANLTFKQRRDAPPEGPSAKKPKKEASQKQKGGGQGKKKKNQGKKKAKTGPPNPKAQNGNKKKTNKKPGKRQRMVMKLESDKTFPIMLEGKINGYACVVGGKLFRPMHVEGKIDNDVLAALKTKKASKYDLEYADVPQNMRADTFKYTHEKPQGYYSWHHGAVQYENGRFTVPKGVGAKGDSGRPILDNQGRVVAIVLGGVNEGSRTALSINVVMWNEKGVTVKYTPENCEQWSLVTTMCLLANVTFPCAQPPICYDRKPAETLAMLSINVNVDNPGYDELLEAAVKCPGRKRRSTEELFKEYKLTRPYMARCIRCAVGSCHSPIAIEAVKSDGHDGYVRLQTSSQYGLDSSGNLKGRTMRYDMHGTIKEIPLHQVSLHTSRPCHIVDGHGYFLLARCPAGDSITMEFKKDSINVTHSCSINVPYEVKFNPVGRELYTHPPEHGVEQACQVYAHDAQNRGAYVEMHLPGSEVDSSLVSLSGSSINVTVTPPVGTSALVECECGGTKISETINKTKQFSQCTKKEQCRAYRLQNDKWVYNSDKLPKAAGATLKGKLHVPFLLADGKCTVPLAPEPMITFGFRSINVSLKLHPKNPTYLTTRQLADEPHYTHELISEPAVRNFTVTEKGWEFVWGNHPPKRFWAQETAPGNPHGLPHEVITHYYHRYPMSTILGLSICAAIATVSINVAASTWLFCRSRVACLTPYRLTPNARIPFCLAVLCCARTARAETTWESLDHLWNNNQQMFWIQLLIPLAALIVVTRLLRCVCCVVPFLVMAGAAGAGAYEHATTMPSQAGISYNTIVNRAGYAPLPISITPTKIKLIPTVNLEYVTCHYKTGMDSPAIKCCGSQECTPTYRPDEQCKVFTGVYPFMWGGAYCFCDTENTQVSKAYVMKSDDCLADHAEAYKAHTASINVQAFLNITVGEHSIVTTVYVNGETPVNFNGVKLTAGPLSTAWTPFDRKIVQYAGEIYNYDFPEYGAGQPGAFGDIQSRTVSSSDLYANTNLVLQRPKAGAIHVPYTQAPSGFEQWKKDKAPSLKFTAPFGCEIYTNPIRAENCAVGSIPLAFDIPDALFTRVSETPTLSAAECTLNECVYSSDFGGIATVKYSASKSGKCAVHVPSGTATLKEAAVELTEQGSATIHFSTANIHPEFRLQICTSYVTCKGDCHPPKDHIVTHPQYHAQTFTAAVSKTAWTWLTSLLGGSAVIIIIGLVLATIVAMYVLTNQKHN

SEQ ID NO: 65 - DNA, 2031 bp, unidentified
  source 1..2031: mol_type = genomic DNA; note = Yellow Fever Virus
atggaaacccctgcccagctgctgttcctgctgctgctgtggctgcctgataccaccggcgtgacactcgtgcggaagaacagatggctgctgctgaacgtgaccagcgaggacctgggcaagaccttctctgtgggcaccggcaactgcaccaccaacatcctggaagccaagtactggtgccccgacagcatggagtacaactgccccaacctgagccccagagaggaacccgacgacatcgactgctggtgctacggcgtggaaaacgtgcgggtggcctacggcaagtgcgatagcgccggcagaagcagaagaagcaggcgggccatcgacctgcccacccacgaaaaccacggcctgaaaacccggcaggaaaagtggatgaccggccggatgggcgagcggcagctgcagaaaatcgagagatggctcgtgcgcaaccccttcttcgccgtgaccgccctgacaatcgcctacctcgtgggcagcaacatgacccagagagtcgtgatcgccctgctggtgctggctgtgggccctgcctatagcgcccactgtatcggcatcaccgaccgggacttcatcgagggcgtgcacggcggaacatgggtgtccgctaccctggaacaggataagtgcgtgaccgtgatggcccccgacaagcccagcctggacatcagcctggaaaccgtggccattgacggacccgccgaggccagaaaagtgtgctacaacgccgtgctgacccacgtgaagatcaacgacaagtgccccagcaccggcgaagcccacctggccgaagagaacgagggcgacaacgcctgcaagcggacctacagcgatagaggctggggcaatggctgcggcctgtttggcaagggcagcatcgtggcctgcgccaagttcacctgtgccaagagcatgagcctgttcgaggtggaccagaccaagatccagtacgtgatccgggctcagctgcacgtgggcgccaagcaggaaaactggaacaccgacatcaagaccctgaagttcgacgccctgagcggctcccaggaagccgagtttaccggctatggcaaggccaccctggaatgccaggtgcagaccgccgtggacttcggcaacagctatatcgccgagatggaaaaagaaagctggatcgtggaccggcagtgggcccaggatctgacactgccttggcagtctggctctggcggagtgtggcgggaaatgcaccacctggtggaattcgagcctccccacgccgccaccattagagtgctggccctgggcaatcaggaaggctctctgaaaacagccctgaccggcgccatgagagtgaccaaggacaccaacgacaacaacctgtacaagctgcacggggggcacgtgtcctgcagagtgaaactgtctgccctgacactgaagggcaccagctacaagatgtgcaccgacaagatgagcttcgtgaagaaccccaccgacaccggccacggcacagtcgtgatgcaagtgaaggtgcccaagggcgctccctgcagaatccctgtgatcgtggccgatgatctgacagccgccatcaacaagggcatcctcgtgacagtgaaccctatcgcctccaccaacgatgacgaggtgctgatcgaagtgaacccccccttcggcgactcctacatcatcgtgggcacaggcgacagcagactgacctaccagtggcacaaagagggcagcagcatcggcaagctgttcacccagaccatgaagggcgccgagagactggctgtgatgggagatgccgcctgggactttagcagcgctggcggcttctttaccagcgtgggcaagggaatccacaccgtgttcggcagcgccttccagggactgtttggcggcctgagctggatcaccaaagtgatcatgggcgctgtgctgatctgggtgggaatcaacacccggaacatgaccatgagcatgtccatgatcctcgtgggagtgattatgatgttcctgagcctgggcgtgggagcc

SEQ ID NO: 66 - DNA, 2016 bp, unidentified
  source 1..2016: mol_type = genomic DNA; note = Yellow Fever Virus
atgtggctggtgtccctggccatcgtgacagcctgtgctggcgctgtgacactcgtgcggaagaacagatggctgctgctgaacgtgaccagcgaggacctgggcaagaccttctctgtgggcaccggcaactgcaccaccaacatcctggaagccaagtactggtgccccgacagcatggagtacaactgccccaacctgagccccagagaggaacccgacgacatcgactgctggtgctacggcgtggaaaacgtgcgggtggcctacggcaagtgcgatagcgccggcagaagcagaagaagcaggcgggccatcgacctgcccacccacgaaaaccacggcctgaaaacccggcaggaaaagtggatgaccggccggatgggcgagcggcagctgcagaaaatcgagagatggctcgtgcgcaaccccttcttcgccgtgaccgccctgacaatcgcctacctcgtgggcagcaacatgacccagagagtcgtgatcgccctgctggtgctggctgtgggccctgcctatagcgcccactgtatcggcatcaccgaccgggacttcatcgagggcgtgcacggcggaacatgggtgtccgctaccctggaacaggataagtgcgtgaccgtgatggcccccgacaagcccagcctggacatcagcctggaaaccgtggccattgacggacccgccgaggccagaaaagtgtgctacaacgccgtgctgacccacgtgaagatcaacgacaagtgccccagcaccggcgaagcccacctggccgaagagaacgagggcgacaacgcctgcaagcggacctacagcgatagaggctggggcaatggctgcggcctgtttggcaagggcagcatcgtggcctgcgccaagttcacctgtgccaagagcatgagcctgttcgaggtggaccagaccaagatccagtacgtgatccgggcccagctgcacgtgggagccaagcaggaaaactggaacaccgacatcaagaccctgaagttcgacgccctgagcggctcccaggaagccgagtttaccggctatggcaaggccaccctggaatgccaggtgcagaccgccgtggacttcggcaacagctatatcgccgagatggaaaaagaaagctggatcgtggaccggcagtgggcccaggacctgacactgccttggcagtctggatctggcggcgtgtggcgggaaatgcaccacctggtggaattcgagcctccccatgccgccaccatcagagtgctggccctgggcaatcaggaaggctctctgaaaacagccctgaccggcgccatgagagtgaccaaggacaccaacgacaacaacctgtacaagctgcatggcggccacgtgtcctgcagagtgaagctgtctgccctgaccctgaaaggcaccagctacaagatgtgcaccgacaagatgagcttcgtgaagaaccccaccgacaccggccacggcacagtcgtgatgcaagtgaaggtgcccaagggcgctccctgcagaatccctgtgatcgtggccgatgatctgacagccgccatcaacaagggcatcctcgtgacagtgaaccctatcgcctccaccaacgatgacgaggtgctgatcgaagtgaacccccccttcggcgactcctacatcatcgtgggcacaggcgacagcagactgacctaccagtggcacaaagagggcagcagcatcggcaagctgttcacccagaccatgaagggcgccgagagactggctgtgatgggagatgccgcctgggactttagcagcgctggcggcttctttaccagcgtgggcaagggaatccacaccgtgttcggcagcgccttccagggactgtttggcggcctgagctggatcaccaaagtgatcatgggcgctgtgctgatctgggtgggaatcaacacccggaacatgaccatgagcatgtccatgatcctcgtgggagtgattatgatgttcctgagcctgggcgtgggcgcc

SEQ ID NO: 67 - DNA, 2016 bp, unidentified
  source 1..2016: mol_type = genomic DNA; note = Yellow Fever Virus
atgtggctggtgtccctggccatcgtgacagcctgtgctggcgctgtgacactcgtgcggaagaacagatggctgctgctgaacgtgaccagcgaggacctgggcaagaccttctctgtgggcaccggcaactgcaccaccaacatcctggaagccaagtactggtgccccgacagcatggagtacaactgccccaacctgagccccagagaggaacccgacgacatcgactgctggtgctacggcgtggaaaacgtgcgggtggcctacggcaagtgcgatagcgccggcagaagcagaagaagcaggcgggccatcgacctgcccacccacgaaaaccacggcctgaaaacccggcaggaaaagtggatgaccggccggatgggcgagcggcagctgcagaaaatcgagagatggctcgtgcgcaaccccttcttcgccgtgaccgccctgacaatcgcctacctcgtgggcagcaacatgacccagagagtcgtgatcgccctgctggtgctggctgtgggccctgcctatagcgcccactgtatcggcatcaccgaccgggacttcatcgagggcgtgcacggcggaacatgggtgtccgctaccctggaacaggataagtgcgtgaccgtgatggcccccgacaagcccagcctggacatcagcctggaaaccgtggccattgacggacccgccgaggccagaaaagtgtgctacaacgccgtgctgacccacgtgaagatcaacgacaagtgccccagcaccggcgaagcccacctggccgaagagaacgagggcgacaacgcctgcaagcggacctacagcgatagaggctggggcaatggctgcggcctgtttggcaagggcagcatcgtggcctgcgccaagttcacctgtgccaagagcatgagcctgttcgaggtggaccagaccaagatccagtacgtgatccgggcccagctgcacgtgggagccaagcaggaaaactggaccaccgacatcaagaccctgaagttcgacgccctgagcggctcccaggaagccgagtttaccggctatggcaaggccaccctggaatgccaggtgcagaccgccgtggacttcggcaacagctatatcgccgagatggaaaaagaaagctggatcgtggaccggcagtgggcccaggacctgacactgccttggcagtctggatctggcggcgtgtggcgggaaatgcaccacctggtggaattcgagcctccccatgccgccaccatcagagtgctggccctgggcaatcaggaaggctctctgaaaacagccctgaccggcgccatgagagtgaccaaggacaccaacgacaacaacctgtacaagctgcatggcggccacgtgtcctgcagagtgaagctgtctgccctgaccctgaaaggcaccagctacaagatgtgcaccgacaagatgagcttcgtgaagaaccccaccgacaccggccacggcacagtcgtgatgcaagtgaaggtgcccaagggcgctccctgcagaatccctgtgatcgtggccgatgatctgacagccgccatcaacaagggcatcctcgtgacagtgaaccctatcgcctccaccaacgatgacgaggtgctgatcgaagtgaacccccccttcggcgactcctacatcatcgtgggcacaggcgacagcagactgacctaccagtggcacaaagagggcagcagcatcggcaagctgttcacccagaccatgaagggcgccgagagactggctgtgatgggagatgccgcctgggactttagcagcgctggcggcttctttaccagcgtgggcaagggaatccacaccgtgttcggcagcgccttccagggactgtttggcggcctgagctggatcaccaaagtgatcatgggcgctgtgctgatctgggtgggaatcaacacccggaacatgaccatgagcatgtccatgatcctcgtgggagtgattatgatgttcctgagcctgggcgtgggcgcc

SEQ ID NO: 68 - DNA, 2241 bp, unidentified
  source 1..2241: mol_type = genomic DNA; note = Yellow Fever Virus
atgtggctggtgtccctggccatcgtgacagcctgtgctggcgctgtgacactcgtgcggaaaaacagatggctgctgctgaacgtgaccagcgaggacctgggcaagaccttctctgtaggcaccggcaactgcaccaccaacatcctggaagccaagtactggtgccccgacagcatggagtacaactgccccaacctgagccccagagaggaacccgacgacatcgactgctggtgctacggcgtggaaaacgtgcgggtggcctacggcaagtgcgatagcgccggcagaagcagaagaagcaggcgggccatcgacctgcccacccacgaaaaccacggcctgaaaacccggcaggaaaagtggatgaccggccggatgggcgagcggcagctgcagaaaattgagcggtggtttgtgcggaaccccttcttcgccgtgaccgccctgacaatcgcctacctcgtgggcagcaacatgacccagagagtcgtgatcgccctgctggtgctggctgtgggccctgcctatagcgccattgatctgcctacacacgagaatcatgggctgaaaacaagacaggaaaaatggatgactgggcgcatgggagaaagacagctgcagaaaatcgaacggtggttcgtgcgcaatcctttttttgctgtgactgctctgaccattgcctatctcgtgggatccaatatgacacagcgggtcgtgattgctctgctggtgctggcagtgggacccgcttactccgcccactgtatcggcatcaccgaccgggacttcatcgagggcgtgcacggcggaacatgggtgtccgctaccctggaacaggataagtgcgtgaccgtgatggcccccgacaagcccagcctggacatcagcctggaaaccgtggccatcgatagacccgccgaagtgcggaaagtgtgctacaacgccgtgctgacccacgtgaagatcaacgacaagtgccccagcaccggcgaagcccacctggccgaagagaacgagggcgacaacgcctgcaagcggacctacagcgatagaggctggggcaatggctgcggcctgtttggcaagggcagcatcgtggcctgcgccaagttcacctgtgccaagagcatgagcctgttcgaggtggaccagaccaagatccagtacgtgatccgggcccagctgcacgtgggagccaagcaggaaaactggaacaccgacatcaagaccctgaagttcgacgccctgagcggctcccaggaagtggaattcatcggctatggcaaggccaccctggaatgtcaggtgcagaccgccgtggacttcggcaacagctatatcgccgagatggaaaccgagagctggatcgtggaccggcagtgggctcaggatctgaccctgccttggcagtctggctctggcggagtgtggcgggaaatgcaccacctggtggaattcgagcctccccacgccgccaccattagagtgctggccctgggcaatcaggaaggctctctgaaaacagccctgaccggcgccatgagagtgaccaaggacaccaacgacaacaacctgtacaagctgcatggcggccacgtgtcctgcagagtgaagctgtctgccctgacactgaagggcaccagctacaagatctgcaccgacaagatgttcttcgtgaagaaccccaccgacaccggccacggcacagtcgtgatgcaagtgaaggtgtccaagggcgctccctgccggatccctgtgatcgtggccgatgatctgacagccgccatcaacaagggcatcctcgtgacagtgaaccctatcgcctccaccaacgatgacgaggtgctgatcgaagtgaacccccccttcggcgactcctacatcatcgtgggacggggcgacagcagactgacctaccagtggcacaaagagggcagcagcatcggcaagctgttcacccagaccatgaagggcgtggaacggctggccgtgatgggagataccgcctgggatttctctagcgctggcggcttcttcaccagcgtgggcaagggaatccacaccgtgttcggcagcgccttccagggactgttcggcggcctgaactggatcaccaaagtgatcatgggcgctgtgctgatctgggtgggaatcaacacccggaacatgaccatgagcatgtccatgatcctcgtgggagtgattatgatgttcctgagcctgggtgtgggcgcc

SEQ ID NO: 69 - DNA, 2256 bp, unidentified
  source 1..2256: mol_type = genomic DNA; note = Yellow Fever Virus
atggaaacccctgcccagctgctgttcctgctgctgctgtggctgcctgataccaccggcgtgacactcgtgcggaagaacagatggctgctgctgaacgtgaccagcgaggacctgggcaagaccttctctgtgggcaccggcaactgcaccaccaacatcctggaagccaagtactggtgccccgacagcatggagtacaactgccccaacctgagccccagagaggaacccgacgacatcgactgctggtgctacggcgtggaaaacgtgcgggtggcctacggcaagtgcgatagcgccggcagaagcagaagaagcaggcgggccatcgacctgcccacccacgaaaaccacggcctgaaaacccggcaggaaaagtggatgaccggccggatgggcgagcggcagctgcagaaaattgagcggtggtttgtgcggaaccccttcttcgccgtgaccgccctgacaatcgcctacctcgtgggcagcaacatgacccagagagtcgtgatcgccctgctggtgctggctgtgggccctgcctatagcgccattgatctgcctacacacgagaatcatgggctgaaaacaagacaggaaaaatggatgactgggcgcatgggagaaagacagctgcagaaaatcgaacggtggttcgtgcgcaatcctttttttgctgtgactgctctgaccattgcctatctcgtgggatccaatatgacacagcgggtcgtgattgctctgctggtgctggcagtgggacccgcttactccgcccactgtatcggcatcaccgaccgggacttcatcgagggcgtgcacggcggaacatgggtgtccgctaccctggaacaggataagtgcgtgaccgtgatggcccccgacaagcccagcctggacatcagcctggaaaccgtggccatcgatagacccgccgaagtgcggaaagtgtgctacaacgccgtgctgacccacgtgaagatcaacgacaagtgccccagcaccggcgaagcccacctggccgaagagaacgagggcgacaacgcctgcaagcggacctacagcgatagaggctggggcaatggctgcggcctgtttggcaagggcagcatcgtggcctgcgccaagttcacctgtgccaagagcatgagcctgttcgaggtggaccagaccaagatccagtacgtgatccgggctcagctgcacgtgggcgccaagcaggaaaactggaacaccgacatcaagaccctgaagttcgacgccctgagcggctcccaggaagtggaattcatcggctatggcaaggccaccctggaatgtcaggtgcagaccgccgtggacttcggcaacagctatatcgccgagatggaaaccgagagctggatcgtggaccggcagtgggcccaggatctgacactgccttggcagtctggctctggcggagtgtggcgggaaatgcaccacctggtggaattcgagcctccccacgccgccaccattagagtgctggccctgggcaatcaggaaggctctctgaaaacagccctgaccggcgccatgagagtgaccaaggacaccaacgacaacaacctgtacaagctgcacggggggcacgtgtcctgcagagtgaaactgtctgccctgacactgaagggcaccagctacaagatctgcaccgacaagatgttcttcgtgaagaaccccaccgacaccggccacggcacagtcgtgatgcaagtgaaggtgtccaagggcgctccctgccggatccctgtgatcgtggccgatgatctgacagccgccatcaacaagggcatcctcgtgacagtgaaccctatcgcctccaccaacgatgacgaggtgctgatcgaagtgaacccccccttcggcgactcctacatcatcgtgggacggggcgacagcagactgacctaccagtggcacaaagagggcagcagcatcggcaagctgttcacccagaccatgaagggcgtggaacggctggccgtgatgggagataccgcctgggatttctctagcgctggcggcttcttcaccagcgtgggcaagggaatccacaccgtgttcggcagcgccttccagggactgttcggcggcctgaactggatcaccaaagtgatcatgggcgctgtgctgatctgggtgggaatcaacacccggaacatgaccatgagcatgtccatgatcctcgtgggagtgattatgatgttcctgagcctgggcgtgggtgcc

SEQ ID NO: 70 - DNA, 2016 bp, unidentified; identical to SEQ ID NO: 67
  source 1..2016: mol_type = genomic DNA; note = Yellow Fever Virus

SEQ ID NO: 71 - DNA, 2256 bp, unidentified; identical to SEQ ID NO: 69
  source 1..2256: mol_type = genomic DNA; note = Yellow Fever Virus

SEQ ID NO: 72 - DNA, 2241 bp, unidentified; identical to SEQ ID NO: 68
  source 1..2241: mol_type = genomic DNA; note = Yellow Fever Virus

SEQ ID NO: 73 - DNA, 2016 bp, unidentified; identical to SEQ ID NO: 66
  source 1..2016: mol_type = genomic DNA; note = Yellow Fever Virus

SEQ ID NO: 74 - DNA, 2031 bp, unidentified; identical to SEQ ID NO: 65
  source 1..2031: mol_type = genomic DNA; note = Yellow Fever Virus

SEQ ID NO: 75 - DNA, 2241 bp, synthetic construct
  misc_feature 1..2241: note = Synthetic Polynucleotide
  source 1..2241: mol_type = other DNA
atgtggctggtgtccctggccatcgtgacagcctgtgctggcgctgtgacactcgtgcggaaaaacagatggctgctgctgaacgtgaccagcgaggacctgggcaagaccttctctgtaggcaccggcaactgcaccaccaacatcctggaagccaagtactggtgccccgacagcatggagtacaactgccccaacctgagccccagagaggaacccgacgacatcgactgctggtgctacggcgtggaaaacgtgcgggtggcctacggcaagtgcgatagcgccggcagaagcagaagaagcaggcgggccatcgacctgcccacccacgaaaaccacggcctgaaaacccggcaggaaaagtggatgaccggccggatgggcgagcggcagctgcagaaaattgagcggtggtttgtgcggaaccccttcttcgccgtgaccgccctgacaatcgcctacctcgtgggcagcaacatgacccagagagtcgtgatcgccctgctggtgctggctgtgggccctgcctatagcgccattgatctgcctacacacgagaatcatgggctgaaaacaagacaggaaaaatggatgactgggcgcatgggagaaagacagctgcagaaaatcgaacggtggttcgtgcgcaatcctttttttgctgtgactgctctgaccattgcctatctcgtgggatccaatatgacacagcgggtcgtgattgctctgctggtgctggcagtgggacccgcttactccgcccactgtatcggcatcaccgaccgggacttcatcgagggcgtgcacggcggaacatgggtgtccgctaccctggaacaggataagtgcgtgaccgtgatggcccccgacaagcccagcctggacatcagcctggaaaccgtggccatcgatagacccgccgaagtgcggaaagtgtgctacaacgccgtgctgacccacgtgaagatcaacgacaagtgccccagagaaggcgaagcccacctggccgaagagaacgagggcgacaacgcctgcaagcggacctacagcgatagaggcagaggcaatggctgcggcagatttggcaagggcagcatcgtggcctgcgccaagttcacctgtgccaagagcatgagcctgttcgaggtggaccagaccaagatccagtacgtgatccgggcccagctgcacgtgggagccaagcaggaaaactggaacaccgacatcaagaccctgaagttcgacgccctgagcggctcccaggaagtggaattcatcggctatggcaaggccaccctggaatgtcaggtgcagaccgccgtggacttcggcaacagctatatcgccgagatggaaaccgagagctggatcgtggaccggcagtgggctcaggatctgaccctgccttggcagtctggctctggcggagtgtggcgggaaatgcaccacctggtggaattcgagcctccccacgccgccaccattagagtgctggccctgggcaatcaggaaggctctctgaaaacagccctgaccggcgccatgagagtgaccaaggacaccaacgacaacaacctgtacaagctgcatggcggccacgtgtcctgcagagtgaagctgtctgccctgacactgaagggcaccagctacaagatctgcaccgacaagatgttcttcgtgaagaaccccaccgacaccggccacggcacagtcgtgatgcaagtgaaggtgtccaagggcgctccctgccggatccctgtgatcgtggccgatgatctgacagccgccatcaacaagggcatcctcgtgacagtgaaccctatcgcctccaccaacgatgacgaggtgctgatcgaagtgaacccccccttcggcgactcctacatcatcgtgggacggggcgacagcagactgacctaccagtggcacaaagagggcagcagcatcggcaagctgttcacccagaccatgaagggcgtggaacggctggccgtgatgggagataccgcctgggatttctctagcgctggcggcttcttcaccagcgtgggcaagggaatccacaccgtgttcggcagcgccttccagggactgttcggcggcctgaactggatcaccaaagtgatcatgggcgctgtgctgatctgggtgggaatcaacacccggaacatgaccatgagcatgtccatgatcctcgtgggagtgattatgatgttcctgagcctgggtgtgggcgcc

SEQ ID NO: 76 - DNA, 2256 bp, synthetic construct
  misc_feature 1..2256: note = Synthetic Polynucleotide
  source 1..2256: mol_type = other DNA
atggaaacccctgcccagctgctgttcctgctgctgctgtggctgcctgataccaccggcgtgacactcgtgcggaagaacagatggctgctgctgaacgtgaccagcgaggacctgggcaagaccttctctgtgggcaccggcaactgcaccaccaacatcctggaagccaagtactggtgccccgacagcatggagtacaactgccccaacctgagccccagagaggaacccgacgacatcgactgctggtgctacggcgtggaaaacgtgcgggtggcctacggcaagtgcgatagcgccggcagaagcagaagaagcaggcgggccatcgacctgcccacccacgaaaaccacggcctgaaaacccggcaggaaaagtggatgaccggccggatgggcgagcggcagctgcagaaaattgagcggtggtttgtgcggaaccccttcttcgccgtgaccgccctgacaatcgcctacctcgtgggcagcaacatgacccagagagtcgtgatcgccctgctggtgctggctgtgggccctgcctatagcgccattgatctgcctacacacgagaatcatgggctgaaaacaagacaggaaaaatggatgactgggcgcatgggagaaagacagctgcagaaaatcgaacggtggttcgtgcgcaatcctttttttgctgtgactgctctgaccattgcctatctcgtgggatccaatatgacacagcgggtcgtgattgctctgctggtgctggcagtgggacccgcttactccgcccactgtatcggcatcaccgaccgggacttcatcgagggcgtgcacggcggaacatgggtgtccgctaccctggaacaggataagtgcgtgaccgtgatggcccccgacaagcccagcctggacatcagcctggaaaccgtggccatcgatagacccgccgaagtgcggaaagtgtgctacaacgccgtgctgacccacgtgaagatcaacgacaagtgccccagagaaggcgaagcccacctggccgaagagaacgagggcgacaacgcctgcaagcggacctacagcgatagaggcagaggcaatggctgcggcagatttggcaagggcagcatcgtggcctgcgccaagttcacctgtgccaagagcatgagcctgttcgaggtggaccagaccaagatccagtacgtgatccgggctcagctgcacgtgggcgccaagcaggaaaactggaacaccgacatcaagaccctgaagttcgacgccctgagcggctcccaggaagtggaattcatcggctatggcaaggccaccctggaatgtcaggtgcagaccgccgtggacttcggcaacagctatatcgccgagatggaaaccgagagctggatcgtggaccggcagtgggcccaggatctgacactgccttggcagtctggctctggcggagtgtggcgggaaatgcaccacctggtggaattcgagcctccccacgccgccaccattagagtgctggccctgggcaatcaggaaggctctctgaaaacagccctgaccggcgccatgagagtgaccaaggacaccaacgacaacaacctgtacaagctgcacggggggcacgtgtcctgcagagtgaaactgtctgccctgacactgaagggcaccagctacaagatctgcaccgacaagatgttcttcgtgaagaaccccaccgacaccggccacggcacagtcgtgatgcaagtgaaggtgtccaagggcgctccctgccggatccctgtgatcgtggccgatgatctgacagccgccatcaacaagggcatcctcgtgacagtgaaccctatcgcctccaccaacgatgacgaggtgctgatcgaagtgaacccccccttcggcgactcctacatcatcgtgggacggggcgacagcagactgacctaccagtggcacaaagagggcagcagcatcggcaagctgttcacccagaccatgaagggcgtggaacggctggccgtgatgggagataccgcctgggatttctctagcgctggcggcttcttcaccagcgtgggcaagggaatccacaccgtgttcggcagcgccttccagggactgttcggcggcctgaactggatcaccaaagtgatcatgggcgctgtgctgatctgggtgggaatcaacacccggaacatgaccatgagcatgtccatgatcctcgtgggagtgattatgatgttcctgagcctgggcgtgggtgcc

SEQ ID NO: 77 - DNA, 2241 bp, synthetic construct
  misc_feature 1..2241: note = Synthetic Polynucleotide
  source 1..2241: mol_type = other DNA
atgtggctggtgtccctggccatcgtgacagcctgtgctggcgctgtgacactcgtgcggaagaacagatggctgctgctgaacgtgaccagcgaggacctgggcaagaccttctctgtaggcaccggcaactgcaccaccaacatcctggaagccaagtactggtgccccgacagcatggagtacaactgccccaacctgagccccagagaggaacccgacgacatcgactgctggtgctacggcgtggaaaacgtgcgggtggcctacggcaagtgcgatagcgccggcagaagcagaagaagcaggcgggccatcgacctgcccacccacgaaaaccacggcctgaaaacccggcaggaaaagtggatgaccggccggatgggcgagcggcagctgcagaaaattgagcggtggtttgtgcggaaccccttcttcgccgtgaccgccctgacaatcgcctacctcgtgggcagcaacatgacccagagagtcgtgatcgccctgctggtgctggctgtgggccctgcctatagcgccattgatctgcctacacacgagaatcatgggctgaaaacaagacaggagaaatggatgactgggcgcatgggagaaagacagctgcagaaaatcgaacggtggttcgtgcgcaatcctttctttgctgtgactgctctgaccattgcctatctcgtgggatccaatatgacacagcgggtcgtgattgctctgctggtgctggcagtgggacccgcttactccgcccactgtatcggcatcaccgaccgggacttcatcgagggcgtgcacggcggaacatgggtgtccgctaccctggaacaggataagtgcgtgaccgtgatggcccccgacaagcccagcctggacatcagcctggaaaccgtggccatcgatagacccgccgaagtgcggaaagtgtgctacaacgccgtgctgacccacgtgaagatcaacgacaagtgccccagagaaggcgaagcccacctggccgaagagaacgagggcgacaacgcctgcaagcggacctacagcgatagaggcagaggcaatggctgcggcagatttggcaagggcagcatcgtggcctgcgccaagttcacctgtgccaagagcatgagcctgttcgaggtggaccagaccaagatccagtacgtgatccgggcccagctgcacgtgggagccaagcaggaaaactggaacaccgacatcaagaccctgaagttcgacgccctgagcggctcccaggaagtggaattcatcggctatggcaaggccaccctggaatgtcaggtgcagaccgccgtggacttcggcaacagctatatcgccgagatggaaaccgagagctggatcgtggaccggcagtgggctcaggatctgaccctgccttggcagtctggctctggcggagtgtggcgggaaatgcaccacctggtggaattcgagcctccccacgccgccaccattagagtgctggccctgggcaatcaggaaggctctctgaaaacagccctgaccggcgccatgagagtgaccaaggacaccaacgacaacaacctgtacaagctgcatggcggccacgtgtcctgcagagtgaagctgtctgccctgacactgaagggcaccagctacaagatctgcaccgacaagatgttcttcgtgaagaaccccaccgacaccggccacggcacagtcgtgatgcaagtgaaggtgtccaagggcgctccctgccggatccctgtgatcgtggccgatgatctgacagccgccatcaacaagggcatcctcgtgacagtgaaccctatcgcctccaccaacgatgacgaggtgctgatcgaagtgaatcctcccttcggcgactcctacatcatcgtgggacggggcgacagcagactgacctaccagtggcacaaagagggcagcagcatcggcaagctgttcacccagaccatgaagggcgtggaacggctggccgtgatgggagataccgcctgggatttctctagcgctggcggcttcttcaccagcgtgggcaagggaatccacaccgtgttcggcagcgccttccagggactgttcggcggcctgaactggatcaccaaagtgatcatgggcgctgtgctgatctgggtgggaatcaacacccggaacatgaccatgagcatgtccatgatcctcgtgggagtgattatgatgttcctgagcctgggtgtgggcgcc

SEQ ID NO: 78 - DNA, 2241 bp, synthetic construct
  misc_feature 1..2241: note = Synthetic Polynucleotide
  source 1..2241: mol_type = other DNA
atgtggctggtgtccctggccatcgtgacagcctgtgctggcgctgtgacactcgtgcggaagaacagatggctgctgctgaacgtgaccagcgaggacctgggcaagaccttctctgtaggcaccggcaactgcaccaccaacatcctggaagccaagtactggtgccccgacagcatggagtacaactgccccaacctgagccccagagaggaacccgacgacatcgactgctggtgctacggcgtggaaaacgtgcgggtggcctacggcaagtgcgatagcgccggcagaagcagaagaagcaggcgggccatcgacctgcccacccacgaaaaccacggcctgaaaacccggcaggaaaagtggatgaccggccggatgggcgagcggcagctgcagaaaattgagcggtggtttgtgcggaaccccttcttcgccgtgaccgccctgacaatcgcctacctcgtgggcagcaacatgacccagagagtcgtgatcgccctgctggtgctggctgtgggccctgcctatagcgccattgatctgcctacacacgagaatcatgggctgaaaacaagacaggagaaatggatgactgggcgcatgggagaaagacagctgcagaaaatcgaacggtggttcgtgcgcaatcctttctttgctgtgactgctctgaccattgcctatctcgtgggatccaatatgacacagcgggtcgtgattgctctgctggtgctggcagtgggacccgcttactccgcccactgtatcggcatcaccgaccgggacttcatcgagggcgtgcacggcggaacatgggtgtccgctaccctggaacaggataagtgcgtgaccgtgatggcccccgacaagcccagcctggacatcagcctggaaaccgtggccatcgatagacccgccgaagtgcggaaagtgtgctacaacgccgtgctgacccacgtgaagatcaacgacaagtgccccagcaccggcgaagcccacctggccgaagagaacgagggcgacaacgcctgcaagcggacctacagcgatagaggctggggcaatggctgcggcctgtttggcaagggcagcatcgtggcctgcgccaagttcacctgtgccaagagcatgagcctgttcgaggtggaccagaccaagatccagtacgtgatccgggcccagctgcacgtgggagccaagcaggaaaactggaacaccgacatcaagaccctgaagttcgacgccctgagcggctcccaggaagtggaattcatcggctatggcaaggccaccctggaatgtcaggtgcagaccgccgtggacttcggcaacagctatatcgccgagatggaaaccgagagctggatcgtggaccggcagtgggctcaggatctgaccctgccttggcagtctggctctggcggagtgtggcgggaaatgcaccacctggtggaattcgagcctccccacgccgccaccattagagtgctggccctgggcaatcaggaaggctctctgaaaacagccctgaccggcgccatgagagtgaccaaggacaccaacgacaacaacctgtacaagctgcatggcggccacgtgtcctgcagagtgaagctgtctgccctgacactgaagggcaccagctacaagatctgcaccgacaagatgttcttcgtgaagaaccccaccgacaccggccacggcacagtcgtgatgcaagtgaaggtgtccaagggcgctccctgccggatccctgtgatcgtggccgatgatctgacagccgccatcaacaagggcatcctcgtgacagtgaaccctatcgcctccaccaacgatgacgaggtgctgatcgaagtgaatcctcccttcggcgactcctacatcatcgtgggacggggcgacagcagactgacctaccagtggcacaaagagggcagcagcatcggcaagctgttcacccagaccatgaagggcgtggaacggctggccgtgatgggagataccgcctgggatttctctagcgctggcggcttcttcaccagcgtgggcaagggaatccacaccgtgttcggcagcgccttccagggactgttcggcggcctgaactggatcaccaaagtgatcatgggcgctgtgctgatctgggtgggaatcaacacccggaacatgaccatgagcatgtccatgatcctcgtgggagtgattatgatgttcctgagcctgggtgtgggcgcc

SEQ ID NO: 79 - DNA, 2256 bp, synthetic construct
  misc_feature 1..2256: note = Synthetic Polynucleotide
  source 1..2256: mol_type = other DNA
atggaaacccctgcccagctgctgttcctgctgctgctgtggctgcctgataccaccggcgtgacactcgtgcggaagaacagatggctgctgctgaacgtgaccagcgaggacctgggcaagaccttctctgtgggcaccggcaactgcaccaccaacatcctggaagccaagtactggtgccccgacagcatggagtacaactgccccaacctgagccccagagaggaacccgacgacatcgactgctggtgctacggcgtggaaaacgtgcgggtggcctacggcaagtgcgatagcgccggcagaagcagaagaagcaggcgggccatcgacctgcccacccacgaaaaccacggcctgaaaacccggcaggaaaagtggatgaccggccggatgggcgagcggcagctgcagaaaattgagcggtggtttgtgcggaaccccttcttcgccgtgaccgccctgacaatcgcctacctcgtgggcagcaacatgacccagagagtcgtgatcgccctgctggtgctggctgtgggccctgcctatagcgccattgatctgcctacacacgagaatcatgggctgaaaacaagacaggagaaatggatgactgggcgcatgggagaaagacagctgcagaaaatcgaacggtggttcgtgcgcaatccgttctttgctgtgactgctctgaccattgcctatctcgtgggatccaatatgacacagcgggtcgtgattgctctgctggtgctggcagtgggacccgcttactccgcccactgtatcggcatcaccgaccgggacttcatcgagggcgtgcacggcggaacatgggtgtccgctaccctggaacaggataagtgcgtgaccgtgatggcccccgacaagcccagcctggacatcagcctggaaaccgtggccatcgatagacccgccgaagtgcggaaagtgtgctacaacgccgtgctgacccacgtgaagatcaacgacaagtgccccagagaaggcgaagcccacctggccgaagagaacgagggcgacaacgcctgcaagcggacctacagcgatagaggcagaggcaatggctgcggcagatttggcaagggcagcatcgtggcctgcgccaagttcacctgtgccaagagcatgagcctgttcgaggtggaccagaccaagatccagtacgtgatccgggctcagctgcacgtgggcgccaagcaggaaaactggaacaccgacatcaagaccctgaagttcgacgccctgagcggctcccaggaagtggaattcatcggctatggcaaggccaccctggaatgtcaggtgcagaccgccgtggacttcggcaacagctatatcgccgagatggaaaccgagagctggatcgtggaccggcagtgggcccaggatctgacactgccttggcagtctggctctggcggagtgtggcgggaaatgcaccacctggtggaattcgagcctccccacgccgccaccattagagtgctggccctgggcaatcaggaaggctctctgaaaacagccctgaccggcgccatgagagtgaccaaggacaccaacgacaacaacctgtacaagctgcacggggggcacgtgtcctgcagagtgaaactgtctgccctgacactgaagggcaccagctacaagatctgcaccgacaagatgttcttcgtgaagaaccccaccgacaccggccacggcacagtcgtgatgcaagtgaaggtgtccaagggcgctccctgccggatccctgtgatcgtggccgatgatctgacagccgccatcaacaagggcatcctcgtgacagtgaaccctatcgcctccaccaacgatgacgaggtgctgatcgaagtgaaccctcctttcggcgactcctacatcatcgtgggacggggcgacagcagactgacctaccagtggcacaaagagggcagcagcatcggcaagctgttcacccagaccatgaagggcgtggaacggctggccgtgatgggagataccgcctgggatttctctagcgctggcggcttcttcaccagcgtgggcaagggaatccacaccgtgttcggcagcgccttccagggactgttcggcggcctgaactggatcaccaaagtgatcatgggcgctgtgctgatctgggtgggaatcaacacccggaacatgaccatgagcatgtccatgatcctcgtgggagtgattatgatgttcctgagcctgggcgtgggtgcc

SEQ ID NO: 80 - DNA, 2256 bp, synthetic construct
  misc_feature 1..2256: note = Synthetic Polynucleotide
  source 1..2256: mol_type = other DNA
atggaaacccctgcccagctgctgttcctgctgctgctgtggctgcctgataccaccggcgtgacactcgtgcggaagaacagatggctgctgctgaacgtgaccagcgaggacctgggcaagaccttctctgtgggcaccggcaactgcaccaccaacatcctggaagccaagtactggtgccccgacagcatggagtacaactgccccaacctgagccccagagaggaacccgacgacatcgactgctggtgctacggcgtggaaaacgtgcgggtggcctacggcaagtgcgatagcgccggcagaagcagaagaagcaggcgggccatcgacctgcccacccacgaaaaccacggcctgaaaacccggcaggaaaagtggatgaccggccggatgggcgagcggcagctgcagaaaattgagcggtggtttgtgcggaaccccttcttcgccgtgaccgccctgacaatcgcctacctcgtgggcagcaacatgacccagagagtcgtgatcgccctgctggtgctggctgtgggccctgcctatagcgccattgatctgcctacacacgagaatcatgggctgaaaacaagacaggagaaatggatgactgggcgcatgggagaaagacagctgcagaaaatcgaacggtggttcgtgcgcaatccgttctttgctgtgactgctctgaccattgcctatctcgtgggatccaatatgacacagcgggtcgtgattgctctgctggtgctggcagtgggacccgcttactccgcccactgtatcggcatcaccgaccgggacttcatcgagggcgtgcacggcggaacatgggtgtccgctaccctggaacaggataagtgcgtgaccgtgatggcccccgacaagcccagcctggacatcagcctggaaaccgtggccatcgatagacccgccgaagtgcggaaagtgtgctacaacgccgtgctgacccacgtgaagatcaacgacaagtgccccagcaccggcgaagcccacctggccgaagagaacgagggcgacaacgcctgcaagcggacctacagcgatagaggctggggcaatggctgcggcctgtttggcaagggcagcatcgtggcctgcgccaagttcacctgtgccaagagcatgagcctgttcgaggtggaccagaccaagatccagtacgtgatccgggctcagctgcacgtgggcgccaagcaggaaaactggaacaccgacatcaagaccctgaagttcgacgccctgagcggctcccaggaagtggaattcatcggctatggcaaggccaccctggaatgtcaggtgcagaccgccgtggacttcggcaacagctatatcgccgagatggaaaccgagagctggatcgtggaccggcagtgggcccaggatctgacactgccttggcagtctggctctggcggagtgtggcgggaaatgcaccacctggtggaattcgagcctccccacgccgccaccattagagtgctggccctgggcaatcaggaaggctctctgaaaacagccctgaccggcgccatgagagtgaccaaggacaccaacgacaacaacctgtacaagctgcacggggggcacgtgtcctgcagagtgaaactgtctgccctgacactgaagggcaccagctacaagatctgcaccgacaagatgttcttcgtgaagaaccccaccgacaccggccacggcacagtcgtgatgcaagtgaaggtgtccaagggcgctccctgccggatccctgtgatcgtggccgatgatctgacagccgccatcaacaagggcatcctcgtgacagtgaaccctatcgcctccaccaacgatgacgaggtgctgatcgaagtgaaccctcctttcggcgactcctacatcatcgtgggacggggcgacagcagactgacctaccagtggcacaaagagggcagcagcatcggcaagctgttcacccagaccatgaagggcgtggaacggctggccgtgatgggagataccgcctgggatttctctagcgctggcggcttcttcaccagcgtgggcaagggaatccacaccgtgttcggcagcgccttccagggactgttcggcggcctgaactggatcaccaaagtgatcatgggcgctgtgctgatctgggtgggaatcaacacccggaacatgaccatgagcatgtccatgatcctcgtgggagtgattatgatgttcctgagcctgggcgtgggtgcc

SEQ ID NO: 81 - RNA, 2031 nt, unidentified
  source 1..2031: mol_type = genomic RNA; note = Yellow Fever Virus
atggaaacccctgcccagctgctgttcctgctgctgctgtggctgcctgataccaccggcgtgacactcgtgcggaagaacagatggctgctgctgaacgtgaccagcgaggacctgggcaagaccttctctgtgggcaccggcaactgcaccaccaacatcctggaagccaagtactggtgccccgacagcatggagtacaactgccccaacctgagccccagagaggaacccgacgacatcgactgctggtgctacggcgtggaaaacgtgcgggtggcctacggcaagtgcgatagcgccggcagaagcagaagaagcaggcgggccatcgacctgcccacccacgaaaaccacggcctgaaaacccggcaggaaaagtggatgaccggccggatgggcgagcggcagctgcagaaaatcgagagatggctcgtgcgcaaccccttcttcgccgtgaccgccctgacaatcgcctacctcgtgggcagcaacatgacccagagagtcgtgatcgccctgctggtgctggctgtgggccctgcctatagcgcccactgtatcggcatcaccgaccgggacttcatcgagggcgtgcacggcggaacatgggtgtccgctaccctggaacaggataagtgcgtgaccgtgatggcccccgacaagcccagcctggacatcagcctggaaaccgtggccattgacggacccgccgaggccagaaaagtgtgctacaacgccgtgctgacccacgtgaagatcaacgacaagtgccccagcaccggcgaagcccacctggccgaagagaacgagggcgacaacgcctgcaagcggacctacagcgatagaggctggggcaatggctgcggcctgtttggcaagggcagcatcgtggcctgcgccaagttcacctgtgccaagagcatgagcctgttcgaggtggaccagaccaagatccagtacgtgatccgggctcagctgcacgtgggcgccaagcaggaaaactggaacaccgacatcaagaccctgaagttcgacgccctgagcggctcccaggaagccgagtttaccggctatggcaaggccaccctggaatgccaggtgcagaccgccgtggacttcggcaacagctatatcgccgagatggaaaaagaaagctggatcgtggaccggcagtgggcccaggatctgacactgccttggcagtctggctctggcggagtgtggcgggaaatgcaccacctggtggaattcgagcctccccacgccgccaccattagagtgctggccctgggcaatcaggaaggctctctgaaaacagccctgaccggcgccatgagagtgaccaaggacaccaacgacaacaacctgtacaagctgcacggggggcacgtgtcctgcagagtgaaactgtctgccctgacactgaagggcaccagctacaagatgtgcaccgacaagatgagcttcgtgaagaaccccaccgacaccggccacggcacagtcgtgatgcaagtgaaggtgcccaagggcgctccctgcagaatccctgtgatcgtggccgatgatctgacagccgccatcaacaagggcatcctcgtgacagtgaaccctatcgcctccaccaacgatgacgaggtgctgatcgaagtgaacccccccttcggcgactcctacatcatcgtgggcacaggcgacagcagactgacctaccagtggcacaaagagggcagcagcatcggcaagctgttcacccagaccatgaagggcgccgagagactggctgtgatgggagatgccgcctgggactttagcagcgctggcggcttctttaccagcgtgggcaagggaatccacaccgtgttcggcagcgccttccagggactgtttggcggcctgagctggatcaccaaagtgatcatgggcgctgtgctgatctgggtgggaatcaacacccggaacatgaccatgagcatgtccatgatcctcgtgggagtgattatgatgttcctgagcctgggcgtgggagcc

SEQ ID NO: 82 - RNA, 2016 nt, unidentified
  source 1..2016: mol_type = genomic RNA; note = Yellow Fever Virus
atgtggctggtgtccctggccatcgtgacagcctgtgctggcgctgtgacactcgtgcggaagaacagatggctgctgctgaacgtgaccagcgaggacctgggcaagaccttctctgtgggcaccggcaactgcaccaccaacatcctggaagccaagtactggtgccccgacagcatggagtacaactgccccaacctgagccccagagaggaacccgacgacatcgactgctggtgctacggcgtggaaaacgtgcgggtggcctacggcaagtgcgatagcgccggcagaagcagaagaagcaggcgggccatcgacctgcccacccacgaaaaccacggcctgaaaacccggcaggaaaagtggatgaccggccggatgggcgagcggcagctgcagaaaatcgagagatggctcgtgcgcaaccccttcttcgccgtgaccgccctgacaatcgcctacctcgtgggcagcaacatgacccagagagtcgtgatcgccctgctggtgctggctgtgggccctgcctatagcgcccactgtatcggcatcaccgaccgggacttcatcgagggcgtgcacggcggaacatgggtgtccgctaccctggaacaggataagtgcgtgaccgtgatggcccccgacaagcccagcctggacatcagcctggaaaccgtggccattgacggacccgccgaggccagaaaagtgtgctacaacgccgtgctgacccacgtgaagatcaacgacaagtgccccagcaccggcgaagcccacctggccgaagagaacgagggcgacaacgcctgcaagcggacctacagcgatagaggctggggcaatggctgcggcctgtttggcaagggcagcatcgtggcctgcgccaagttcacctgtgccaagagcatgagcctgttcgaggtggaccagaccaagatccagtacgtgatccgggcccagctgcacgtgggagccaagcaggaaaactggaacaccgacatcaagaccctgaagttcgacgccctgagcggctcccaggaagccgagtttaccggctatggcaaggccaccctggaatgccaggtgcagaccgccgtggacttcggcaacagctatatcgccgagatggaaaaagaaagctggatcgtggaccggcagtgggcccaggacctgacactgccttggcagtctggatctggcggcgtgtggcgggaaatgcaccacctggtggaattcgagcctccccatgccgccaccatcagagtgctggccctgggcaatcaggaaggctctctgaaaacagccctgaccggcgccatgagagtgaccaaggacaccaacgacaacaacctgtacaagctgcatggcggccacgtgtcctgcagagtgaagctgtctgccctgaccctgaaaggcaccagctacaagatgtgcaccgacaagatgagcttcgtgaagaaccccaccgacaccggccacggcacagtcgtgatgcaagtgaaggtgcccaagggcgctccctgcagaatccctgtgatcgtggccgatgatctgacagccgccatcaacaagggcatcctcgtgacagtgaaccctatcgcctccaccaacgatgacgaggtgctgatcgaagtgaacccccccttcggcgactcctacatcatcgtgggcacaggcgacagcagactgacctaccagtggcacaaagagggcagcagcatcggcaagctgttcacccagaccatgaagggcgccgagagactggctgtgatgggagatgccgcctgggactttagcagcgctggcggcttctttaccagcgtgggcaagggaatccacaccgtgttcggcagcgccttccagggactgtttggcggcctgagctggatcaccaaagtgatcatgggcgctgtgctgatctgggtgggaatcaacacccggaacatgaccatgagcatgtccatgatcctcgtgggagtgattatgatgttcctgagcctgggcgtgggcgcc

SEQ ID NO: 83 - RNA, 2016 nt, unidentified
  source 1..2016: mol_type = genomic RNA; note = Yellow Fever Virus
atgtggctggtgtccctggccatcgtgacagcctgtgctggcgctgtgacactcgtgcggaagaacagatggctgctgctgaacgtgaccagcgaggacctgggcaagaccttctctgtgggcaccggcaactgcaccaccaacatcctggaagccaagtactggtgccccgacagcatggagtacaactgccccaacctgagccccagagaggaacccgacgacatcgactgctggtgctacggcgtggaaaacgtgcgggtggcctacggcaagtgcgatagcgccggcagaagcagaagaagcaggcgggccatcgacctgcccacccacgaaaaccacggcctgaaaacccggcaggaaaagtggatgaccggccggatgggcgagcggcagctgcagaaaatcgagagatggctcgtgcgcaaccccttcttcgccgtgaccgccctgacaatcgcctacctcgtgggcagcaacatgacccagagagtcgtgatcgccctgctggtgctggctgtgggccctgcctatagcgcccactgtatcggcatcaccgaccgggacttcatcgagggcgtgcacggcggaacatgggtgtccgctaccctggaacaggataagtgcgtgaccgtgatggcccccgacaagcccagcctggacatcagcctggaaaccgtggccattgacggacccgccgaggccagaaaagtgtgctacaacgccgtgctgacccacgtgaagatcaacgacaagtgccccagcaccggcgaagcccacctggccgaagagaacgagggcgacaacgcctgcaagcggacctacagcgatagaggctggggcaatggctgcggcctgtttggcaagggcagcatcgtggcctgcgccaagttcacctgtgccaagagcatgagcctgttcgaggtggaccagaccaagatccagtacgtgatccgggcccagctgcacgtgggagccaagcaggaaaactggaccaccgacatcaagaccctgaagttcgacgccctgagcggctcccaggaagccgagtttaccggctatggcaaggccaccctggaatgccaggtgcagaccgccgtggacttcggcaacagctatatcgccgagatggaaaaagaaagctggatcgtggaccggcagtgggcccaggacctgacactgccttggcagtctggatctggcggcgtgtggcgggaaatgcaccacctggtggaattcgagcctccccatgccgccaccatcagagtgctggccctgggcaatcaggaaggctctctgaaaacagccctgaccggcgccatgagagtgaccaaggacaccaacgacaacaacctgtacaagctgcatggcggccacgtgtcctgcagagtgaagctgtctgccctgaccctgaaaggcaccagctacaagatgtgcaccgacaagatgagcttcgtgaagaaccccaccgacaccggccacggcacagtcgtgatgcaagtgaaggtgcccaagggcgctccctgcagaatccctgtgatcgtggccgatgatctgacagccgccatcaacaagggcatcctcgtgacagtgaaccctatcgcctccaccaacgatgacgaggtgctgatcgaagtgaacccccccttcggcgactcctacatcatcgtgggcacaggcgacagcagactgacctaccagtggcacaaagagggcagcagcatcggcaagctgttcacccagaccatgaagggcgccgagagactggctgtgatgggagatgccgcctgggactttagcagcgctggcggcttctttaccagcgtgggcaagggaatccacaccgtgttcggcagcgccttccagggactgtttggcggcctgagctggatcaccaaagtgatcatgggcgctgtgctgatctgggtgggaatcaacacccggaacatgaccatgagcatgtccatgatcctcgtgggagtgattatgatgttcctgagcctgggcgtgggcgcc

SEQ ID NO: 84 - RNA, 2241 nt, unidentified
  source 1..2241: mol_type = genomic RNA; note = Yellow Fever Virus
atgtggctggtgtccctggccatcgtgacagcctgtgctggcgctgtgacactcgtgcggaaaaacagatggctgctgctgaacgtgaccagcgaggacctgggcaagaccttctctgtaggcaccggcaactgcaccaccaacatcctggaagccaagtactggtgccccgacagcatggagtacaactgccccaacctgagccccagagaggaacccgacgacatcgactgctggtgctacggcgtggaaaacgtgcgggtggcctacggcaagtgcgatagcgccggcagaagcagaagaagcaggcgggccatcgacctgcccacccacgaaaaccacggcctgaaaacccggcaggaaaagtggatgaccggccggatgggcgagcggcagctgcagaaaattgagcggtggtttgtgcggaaccccttcttcgccgtgaccgccctgacaatcgcctacctcgtgggcagcaacatgacccagagagtcgtgatcgccctgctggtgctggctgtgggccctgcctatagcgccattgatctgcctacacacgagaatcatgggctgaaaacaagacaggaaaaatggatgactgggcgcatgggagaaagacagctgcagaaaatcgaacggtggttcgtgcgcaatcctttttttgctgtgactgctctgaccattgcctatctcgtgggatccaatatgacacagcgggtcgtgattgctctgctggtgctggcagtgggacccgcttactccgcccactgtatcggcatcaccgaccgggacttcatcgagggcgtgcacggcggaacatgggtgtccgctaccctggaacaggataagtgcgtgaccgtgatggcccccgacaagcccagcctggacatcagcctggaaaccgtggccatcgatagacccgccgaagtgcggaaagtgtgctacaacgccgtgctgacccacgtgaagatcaacgacaagtgccccagcaccggcgaagcccacctggccgaagagaacgagggcgacaacgcctgcaagcggacctacagcgatagaggctggggcaatggctgcggcctgtttggcaagggcagcatcgtggcctgcgccaagttcacctgtgccaagagcatgagcctgttcgaggtggaccagaccaagatccagtacgtgatccgggcccagctgcacgtgggagccaagcaggaaaactggaacaccgacatcaagaccctgaagttcgacgccctgagcggctcccaggaagtggaattcatcggctatggcaaggccaccctggaatgtcaggtgcagaccgccgtggacttcggcaacagctatatcgccgagatggaaaccgagagctggatcgtggaccggcagtgggctcaggatctgaccctgccttggcagtctggctctggcggagtgtggcgggaaatgcaccacctggtggaattcgagcctccccacgccgccaccattagagtgctggccctgggcaatcaggaaggctctctgaaaacagccctgaccggcgccatgagagtgaccaaggacaccaacgacaacaacctgtacaagctgcatggcggccacgtgtcctgcagagtgaagctgtctgccctgacactgaagggcaccagctacaagatctgcaccgacaagatgttcttcgtgaagaaccccaccgacaccggccacggcacagtcgtgatgcaagtgaaggtgtccaagggcgctccctgccggatccctgtgatcgtggccgatgatctgacagccgccatcaacaagggcatcctcgtgacagtgaaccctatcgcctccaccaacgatgacgaggtgctgatcgaagtgaacccccccttcggcgactcctacatcatcgtgggacggggcgacagcagactgacctaccagtggcacaaagagggcagcagcatcggcaagctgttcacccagaccatgaagggcgtggaacggctggccgtgatgggagataccgcctgggatttctctagcgctggcggcttcttcaccagcgtgggcaagggaatccacaccgtgttcggcagcgccttccagggactgttcggcggcctgaactggatcaccaaagtgatcatgggcgctgtgctgatctgggtgggaatcaacacccggaacatgaccatgagcatgtccatgatcctcgtgggagtgattatgatgttcctgagcctgggtgtgggcgcc

SEQ ID NO: 85 - RNA, 2256 nt, unidentified
  source 1..2256: mol_type = genomic RNA; note = Yellow Fever Virus
atggaaacccctgcccagctgctgttcctgctgctgctgtggctgcctgataccaccggcgtgacactcgtgcggaagaacagatggctgctgctgaacgtgaccagcgaggacctgggcaagaccttctctgtgggcaccggcaactgcaccaccaacatcctggaagccaagtactggtgccccgacagcatggagtacaactgccccaacctgagccccagagaggaacccgacgacatcgactgctggtgctacggcgtggaaaacgtgcgggtggcctacggcaagtgcgatagcgccggcagaagcagaagaagcaggcgggccatcgacctgcccacccacgaaaaccacggcctgaaaacccggcaggaaaagtggatgaccggccggatgggcgagcggcagctgcagaaaattgagcggtggtttgtgcggaaccccttcttcgccgtgaccgccctgacaatcgcctacctcgtgggcagcaacatgacccagagagtcgtgatcgccctgctggtgctggctgtgggccctgcctatagcgccattgatctgcctacacacgagaatcatgggctgaaaacaagacaggaaaaatggatgactgggcgcatgggagaaagacagctgcagaaaatcgaacggtggttcgtgcgcaatcctttttttgctgtgactgctctgaccattgcctatctcgtgggatccaatatgacacagcgggtcgtgattgctctgctggtgctggcagtgggacccgcttactccgcccactgtatcggcatcaccgaccgggacttcatcgagggcgtgcacggcggaacatgggtgtccgctaccctggaacaggataagtgcgtgaccgtgatggcccccgacaagcccagcctggacatcagcctggaaaccgtggccatcgatagacccgccgaagtgcggaaagtgtgctacaacgccgtgctgacccacgtgaagatcaacgacaagtgccccagcaccggcgaagcccacctggccgaagagaacgagggcgacaacgcctgcaagcggacctacagcgatagaggctggggcaatggctgcggcctgtttggcaagggcagcatcgtggcctgcgccaagttcacctgtgccaagagcatgagcctgttcgaggtggaccagaccaagatccagtacgtgatccgggctcagctgcacgtgggcgccaagcaggaaaactggaacaccgacatcaagaccctgaagttcgacgccctgagcggctcccaggaagtggaattcatcggctatggcaaggccaccctggaatgtcaggtgcagaccgccgtggacttcggcaacagctatatcgccgagatggaaaccgagagctggatcgtggaccggcagtgggcccaggatctgacactgccttggcagtctggctctggcggagtgtggcgggaaatgcaccacctggtggaattcgagcctccccacgccgccaccattagagtgctggccctgggcaatcaggaaggctctctgaaaacagccctgaccggcgccatgagagtgaccaaggacaccaacgacaacaacctgtacaagctgcacggggggcacgtgtcctgcagagtgaaactgtctgccctgacactgaagggcaccagctacaagatctgcaccgacaagatgttcttcgtgaagaaccccaccgacaccggccacggcacagtcgtgatgcaagtgaaggtgtccaagggcgctccctgccggatccctgtgatcgtggccgatgatctgacagccgccatcaacaagggcatcctcgtgacagtgaaccctatcgcctccaccaacgatgacgaggtgctgatcgaagtgaacccccccttcggcgactcctacatcatcgtgggacggggcgacagcagactgacctaccagtggcacaaagagggcagcagcatcggcaagctgttcacccagaccatgaagggcgtggaacggctggccgtgatgggagataccgcctgggatttctctagcgctggcggcttcttcaccagcgtgggcaagggaatccacaccgtgttcggcagcgccttccagggactgttcggcggcctgaactggatcaccaaagtgatcatgggcgctgtgctgatctgggtgggaatcaacacccggaacatgaccatgagcatgtccatgatcctcgtgggagtgattatgatgttcctgagcctgggcgtgggtgcc

SEQ ID NO: 86 - RNA, 2016 nt, unidentified; identical to SEQ ID NO: 83
  source 1..2016: mol_type = genomic RNA; note = Yellow Fever Virus

SEQ ID NO: 87 - RNA, 2256 nt, unidentified; identical to SEQ ID NO: 85
  source 1..2256: mol_type = genomic RNA; note = Yellow Fever Virus

SEQ ID NO: 88 - RNA, 2241 nt, unidentified; identical to SEQ ID NO: 84
  source 1..2241: mol_type = genomic RNA; note = Yellow Fever Virus

SEQ ID NO: 89 - RNA, 2016 nt, unidentified; identical to SEQ ID NO: 82
  source 1..2016: mol_type = genomic RNA; note = Yellow Fever Virus

SEQ ID NO: 90 - RNA, 2031 nt, unidentified; identical to SEQ ID NO: 81
  source 1..2031: mol_type = genomic RNA; note = Yellow Fever Virus

SEQ ID NO: 91 - RNA, 2241 nt, synthetic construct
  misc_feature 1..2241: note = Synthetic Polynucleotide
  source 1..2241: mol_type = other RNA
atgtggctggtgtccctggccatcgtgacagcctgtgctggcgctgtgacactcgtgcggaaaaacagatggctgctgctgaacgtgaccagcgaggacctgggcaagaccttctctgtaggcaccggcaactgcaccaccaacatcctggaagccaagtactggtgccccgacagcatggagtacaactgccccaacctgagccccagagaggaacccgacgacatcgactgctggtgctacggcgtggaaaacgtgcgggtggcctacggcaagtgcgatagcgccggcagaagcagaagaagcaggcgggccatcgacctgcccacccacgaaaaccacggcctgaaaacccggcaggaaaagtggatgaccggccggatgggcgagcggcagctgcagaaaattgagcggtggtttgtgcggaaccccttcttcgccgtgaccgccctgacaatcgcctacctcgtgggcagcaacatgacccagagagtcgtgatcgccctgctggtgctggctgtgggccctgcctatagcgccattgatctgcctacacacgagaatcatgggctgaaaacaagacaggaaaaatggatgactgggcgcatgggagaaagacagctgcagaaaatcgaacggtggttcgtgcgcaatcctttttttgctgtgactgctctgaccattgcctatctcgtgggatccaatatgacacagcgggtcgtgattgctctgctggtgctggcagtgggacccgcttactccgcccactgtatcggcatcaccgaccgggacttcatcgagggcgtgcacggcggaacatgggtgtccgctaccctggaacaggataagtgcgtgaccgtgatggcccccgacaagcccagcctggacatcagcctggaaaccgtggccatcgatagacccgccgaagtgcggaaagtgtgctacaacgccgtgctgacccacgtgaagatcaacgacaagtgccccagagaaggcgaagcccacctggccgaagagaacgagggcgacaacgcctgcaagcggacctacagcgatagaggcagaggcaatggctgcggcagatttggcaagggcagcatcgtggcctgcgccaagttcacctgtgccaagagcatgagcctgttcgaggtggaccagaccaagatccagtacgtgatccgggcccagctgcacgtgggagccaagcaggaaaactggaacaccgacatcaagaccctgaagttcgacgccctgagcggctcccaggaagtggaattcatcggctatggcaaggccaccctggaatgtcaggtgcagaccgccgtggacttcggcaacagctatatcgccgagatggaaaccgagagctggatcgtggaccggcagtgggctcaggatctgaccctgccttggcagtctggctctggcggagtgtggcgggaaatgcaccacctggtggaattcgagcctccccacgccgccaccattagagtgctggccctgggcaatcaggaaggctctctgaaaacagccctgaccggcgccatgagagtgaccaaggacaccaacgacaacaacctgtacaagctgcatggcggccacgtgtcctgcagagtgaagctgtctgccctgacactgaagggcaccagctacaagatctgcaccgacaagatgttcttcgtgaagaaccccaccgacaccggccacggcacagtcgtgatgcaagtgaaggtgtccaagggcgctccctgccggatccctgtgatcgtggccgatgatctgacagccgccatcaacaagggcatcctcgtgacagtgaaccctatcgcctccaccaacgatgacgaggtgctgatcgaagtgaacccccccttcggcgactcctacatcatcgtgggacggggcgacagcagactgacctaccagtggcacaaagagggcagcagcatcggcaagctgttcacccagaccatgaagggcgtggaacggctggccgtgatgggagataccgcctgggatttctctagcgctggcggcttcttcaccagcgtgggcaagggaatccacaccgtgttcggcagcgccttccagggactgttcggcggcctgaactggatcaccaaagtgatcatgggcgctgtgctgatctgggtgggaatcaacacccggaacatgaccatgagcatgtccatgatcctcgtgggagtgattatgatgttcctgagcctgggtgtgggcgcc

SEQ ID NO: 92 - RNA, 2256 nt, synthetic construct
  misc_feature 1..2256: note = Synthetic Polynucleotide
  source 1..2256: mol_type = other RNA
atggaaacccctgcccagctgctgttcctgctgctgctgtggctgcctgataccaccggcgtgacactcgtgcggaagaacagatggctgctgctgaacgtgaccagcgaggacctgggcaagaccttctctgtgggcaccggcaactgcaccaccaacatcctggaagccaagtactggtgccccgacagcatggagtacaactgccccaacctgagccccagagaggaacccgacgacatcgactgctggtgctacggcgtggaaaacgtgcgggtggcctacggcaagtgcgatagcgccggcagaagcagaagaagcaggcgggccatcgacctgcccacccacgaaaaccacggcctgaaaacccggcaggaaaagtggatgaccggccggatgggcgagcggcagctgcagaaaattgagcggtggtttgtgcggaaccccttcttcgccgtgaccgccctgacaatcgcctacctcgtgggcagcaacatgacccagagagtcgtgatcgccctgctggtgctggctgtgggccctgcctatagcgccattgatctgcctacacacgagaatcatgggctgaaaacaagacaggaaaaatggatgactgggcgcatgggagaaagacagctgcagaaaatcgaacggtggttcgtgcgcaatcctttttttgctgtgactgctctgaccattgcctatctcgtgggatccaatatgacacagcgggtcgtgattgctctgctggtgctggcagtgggacccgcttactccgcccactgtatcggcatcaccgaccgggacttcatcgagggcgtgcacggcggaacatgggtgtccgctaccctggaacaggataagtgcgtgaccgtgatggcccccgacaagcccagcctggacatcagcctggaaaccgtggccatcgatagacccgccgaagtgcggaaagtgtgctacaacgccgtgctgacccacgtgaagatcaacgacaagtgccccagagaaggcgaagcccacctggccgaagagaacgagggcgacaacgcctgcaagcggacctacagcgatagaggcagaggcaatggctgcggcagatttggcaagggcagcatcgtggcctgcgccaagttcacctgtgccaagagcatgagcctgttcgaggtggaccagaccaagatccagtacgtgatccgggctcagctgcacgtgggcgccaagcaggaaaactggaacaccgacatcaagaccctgaagttcgacgccctgagcggctcccaggaagtggaattcatcggctatggcaaggccaccctggaatgtcaggtgcagaccgccgtggacttcggcaacagctatatcgccgagatggaaaccgagagctggatcgtggaccggcagtgggcccaggatctgacactgccttggcagtctggctctggcggagtgtggcgggaaatgcaccacctggtggaattcgagcctccccacgccgccaccattagagtgctggccctgggcaatcaggaaggctctctgaaaacagccctgaccggcgccatgagagtgaccaaggacaccaacgacaacaacctgtacaagctgcacggggggcacgtgtcctgcagagtgaaactgtctgccctgacactgaagggcaccagctacaagatctgcaccgacaagatgttcttcgtgaagaaccccaccgacaccggccacggcacagtcgtgatgcaagtgaaggtgtccaagggcgctccctgccggatccctgtgatcgtggccgatgatctgacagccgccatcaacaagggcatcctcgtgacagtgaaccctatcgcctccaccaacgatgacgaggtgctgatcgaagtgaacccccccttcggcgactcctacatcatcgtgggacggggcgacagcagactgacctaccagtggcacaaagagggcagcagcatcggcaagctgttcacccagaccatgaagggcgtggaacggctggccgtgatgggagataccgcctgggatttctctagcgctggcggcttcttcaccagcgtgggcaagggaatccacaccgtgttcggcagcgccttccagggactgttcggcggcctgaactggatcaccaaagtgatcatgggcgctgtgctgatctgggtgggaatcaacacccggaacatgaccatgagcatgtccatgatcctcgtgggagtgattatgatgttcctgagcctgggcgtgggtgcc

SEQ ID NO: 93 - RNA, 2241 nt, synthetic construct
  misc_feature 1..2241: note = Synthetic Polynucleotide
  source 1..2241: mol_type = other RNA
atgtggctggtgtccctggccatcgtgacagcctgtgctggcgctgtgacactcgtgcggaagaacagatggctgctgctgaacgtgaccagcgaggacctgggcaagaccttctctgtaggcaccggcaactgcaccaccaacatcctggaagccaagtactggtgccccgacagcatggagtacaactgccccaacctgagccccagagaggaacccgacgacatcgactgctggtgctacggcgtggaaaacgtgcgggtggcctacggcaagtgcgatagcgccggcagaagcagaagaagcaggcgggccatcgacctgcccacccacgaaaaccacggcctgaaaacccggcaggaaaagtggatgaccggccggatgggcgagcggcagctgcagaaaattgagcggtggtttgtgcggaaccccttcttcgccgtgaccgccctgacaatcgcctacctcgtgggcagcaacatgacccagagagtcgtgatcgccctgctggtgctggctgtgggccctgcctatagcgccattgatctgcctacacacgagaatcatgggctgaaaacaagacaggagaaatggatgactgggcgcatgggagaaagacagctgcagaaaatcgaacggtggttcgtgcgcaatcctttctttgctgtgactgctctgaccattgcctatctcgtgggatccaatatgacacagcgggtcgtgattgctctgctggtgctggcagtgggacccgcttactccgcccactgtatcggcatcaccgaccgggacttcatcgagggcgtgcacggcggaacatgggtgtccgctaccctggaacaggataagtgcgtgaccgtgatggcccccgacaagcccagcctggacatcagcctggaaaccgtggccatcgatagacccgccgaagtgcggaaagtgtgctacaacgccgtgctgacccacgtgaagatcaacgacaagtgccccagagaaggcgaagcccacctggccgaagagaacgagggcgacaacgcctgcaagcggacctacagcgatagaggcagaggcaatggctgcggcagatttggcaagggcagcatcgtggcctgcgccaagttcacctgtgccaagagcatgagcctgttcgaggtggaccagaccaagatccagtacgtgatccgggcccagctgcacgtgggagccaagcaggaaaactggaacaccgacatcaagaccctgaagttcgacgccctgagcggctcccaggaagtggaattcatcggctatggcaaggccaccctggaatgtcaggtgcagaccgccgtggacttcggcaacagctatatcgccgagatggaaaccgagagctggatcgtggaccggcagtgggctcaggatctgaccctgccttggcagtctggctctggcggagtgtggcgggaaatgcaccacctggtggaattcgagcctccccacgccgccaccattagagtgctggccctgggcaatcaggaaggctctctgaaaacagccctgaccggcgccatgagagtgaccaaggacaccaacgacaacaacctgtacaagctgcatggcggccacgtgtcctgcagagtgaagctgtctgccctgacactgaagggcaccagctacaagatctgcaccgacaagatgttcttcgtgaagaaccccaccgacaccggccacggcacagtcgtgatgcaagtgaaggtgtccaagggcgctccctgccggatccctgtgatcgtggccgatgatctgacagccgccatcaacaagggcatcctcgtgacagtgaaccctatcgcctccaccaacgatgacgaggtgctgatcgaagtgaatcctcccttcggcgactcctacatcatcgtgggacggggcgacagcagactgacctaccagtggcacaaagagggcagcagcatcggcaagctgttcacccagaccatgaagggcgtggaacggctggccgtgatgggagataccgcctgggatttctctagcgctggcggcttcttcaccagcgtgggcaagggaatccacaccgtgttcggcagcgccttccagggactgttcggcggcctgaactggatcaccaaagtgatcatgggcgctgtgctgatctgggtgggaatcaacacccggaacatgaccatgagcatgtccatgatcctcgtgggagtgattatgatgttcctgagcctgggtgtgggcgcc

SEQ ID NO: 94 - RNA, 2241 nt, synthetic construct
  misc_feature 1..2241: note = Synthetic Polynucleotide
  source 1..2241: mol_type = other RNA
atgtggctggtgtccctggccatcgtgacagcctgtgctggcgctgtgacactcgtgcggaagaacagatggctgctgctgaacgtgaccagcgaggacctgggcaagaccttctctgtaggcaccggcaactgcaccaccaacatcctggaagccaagtactggtgccccgacagcatggagtacaactgccccaacctgagccccagagaggaacccgacgacatcgactgctggtgctacggcgtggaaaacgtgcgggtggcctacggcaagtgcgatagcgccggcagaagcagaagaagcaggcgggccatcgacctgcccacccacgaaaaccacggcctgaaaacccggcaggaaaagtggatgaccggccggatgggcgagcggcagctgcagaaaattgagcggtggtttgtgcggaaccccttcttcgccgtgaccgccctgacaatcgcctacctcgtgggcagcaacatgacccagagagtcgtgatcgccctgctggtgctggctgtgggccctgcctatagcgccattgatctgcctacacacgagaatcatgggctgaaaacaagacaggagaaatggatgactgggcgcatgggagaaagacagctgcagaaaatcgaacggtggttcgtgcgcaatcctttctttgctgtgactgctctgaccattgcctatctcgtgggatccaatatgacacagcgggtcgtgattgctctgctggtgctggcagtgggacccgcttactccgcccactgtatcggcatcaccgaccgggacttcatcgagggcgtgcacggcggaacatgggtgtccgctaccctggaacaggataagtgcgtgaccgtgatggcccccgacaagcccagcctggacatcagcctggaaaccgtggccatcgatagacccgccgaagtgcggaaagtgtgctacaacgccgtgctgacccacgtgaagatcaacgacaagtgccccagcaccggcgaagcccacctggccgaagagaacgagggcgacaacgcctgcaagcggacctacagcgatagaggctggggcaatggctgcggcctgtttggcaagggcagcatcgtggcctgcgccaagttcacctgtgccaagagcatgagcctgttcgaggtggaccagaccaagatccagtacgtgatccgggcccagctgcacgtgggagccaagcaggaaaactggaacaccgacatcaagaccctgaagttcgacgccctgagcggctcccaggaagtggaattcatcggctatggcaaggccaccctggaatgtcaggtgcagaccgccgtggacttcggcaacagctatatcgccgagatggaaaccgagagctggatcgtggaccggcagtgggctcaggatctgaccctgccttggcagtctggctctggcggagtgtggcgggaaatgcaccacctggtggaattcgagcctccccacgccgccaccattagagtgctggccctgggcaatcaggaaggctctctgaaaacagccctgaccggcgccatgagagtgaccaaggacaccaacgacaacaacctgtacaagctgcatggcggccacgtgtcctgcagagtgaagctgtctgccctgacactgaagggcaccagctacaagatctgcaccgacaagatgttcttcgtgaagaaccccaccgacaccggccacggcacagtcgtgatgcaagtgaaggtgtccaagggcgctccctgccggatccctgtgatcgtggccgatgatctgacagccgccatcaacaagggcatcctcgtgacagtgaaccctatcgcctccaccaacgatgacgaggtgctgatcgaagtgaatcctcccttcggcgactcctacatcatcgtgggacggggcgacagcagactgacctaccagtggcacaaagagggcagcagcatcggcaagctgttcacccagaccatgaagggcgtggaacggctggccgtgatgggagataccgcctgggatttctctagcgctggcggcttcttcaccagcgtgggcaagggaatccacaccgtgttcggcagcgccttccagggactgttcggcggcctgaactggatcaccaaagtgatcatgggcgctgtgctgatctgggtgggaatcaacacccggaacatgaccatgagcatgtccatgatcctcgtgggagtgattatgatgttcctgagcctgggtgtgggcgcc

SEQ ID NO: 95 - RNA, 2256 nt, synthetic construct
  misc_feature 1..2256: note = Synthetic Polynucleotide
  source 1..2256: mol_type = other RNA
atggaaacccctgcccagctgctgttcctgctgctgctgtggctgcctgataccaccggcgtgacactcgtgcggaagaacagatggctgctgctgaacgtgaccagcgaggacctgggcaagaccttctctgtgggcaccggcaactgcaccaccaacatcctggaagccaagtactggtgccccgacagcatggagtacaactgccccaacctgagccccagagaggaacccgacgacatcgactgctggtgctacggcgtggaaaacgtgcgggtggcctacggcaagtgcgatagcgccggcagaagcagaagaagcaggcgggccatcgacctgcccacccacgaaaaccacggcctgaaaacccggcaggaaaagtggatgaccggccggatgggcgagcggcagctgcagaaaattgagcggtggtttgtgcggaaccccttcttcgccgtgaccgccctgacaatcgcctacctcgtgggcagcaacatgacccagagagtcgtgatcgccctgctggtgctggctgtgggccctgcctatagcgccattgatctgcctacacacgagaatcatgggctgaaaacaagacaggagaaatggatgactgggcgcatgggagaaagacagctgcagaaaatcgaacggtggttcgtgcgcaatccgttctttgctgtgactgctctgaccattgcctatctcgtgggatccaatatgacacagcgggtcgtgattgctctgctggtgctggcagtgggacccgcttactccgcccactgtatcggcatcaccgaccgggacttcatcgagggcgtgcacggcggaacatgggtgtccgctaccctggaacaggataagtgcgtgaccgtgatggcccccgacaagcccagcctggacatcagcctggaaaccgtggccatcgatagacccgccgaagtgcggaaagtgtgctacaacgccgtgctgacccacgtgaagatcaacgacaagtgccccagagaaggcgaagcccacctggccgaagagaacgagggcgacaacgcctgcaagcggacctacagcgatagaggcagaggcaatggctgcggcagatttggcaagggcagcatcgtggcctgcgccaagttcacctgtgccaagagcatgagcctgttcgaggtggaccagaccaagatccagtacgtgatccgggctcagctgcacgtgggcgccaagcaggaaaactggaacaccgacatcaagaccctgaagttcgacgccctgagcggctcccaggaagtggaattcatcggctatggcaaggccaccctggaatgtcaggtgcagaccgccgtggacttcggcaacagctatatcgccgagatggaaaccgagagctggatcgtggaccggcagtgggcccaggatctgacactgccttggcagtctggctctggcggagtgtggcgggaaatgcaccacctggtggaattcgagcctccccacgccgccaccattagagtgctggccctgggcaatcaggaaggctctctgaaaacagccctgaccggcgccatgagagtgaccaaggacaccaacgacaacaacctgtacaagctgcacggggggcacgtgtcctgcagagtgaaactgtctgccctgacactgaagggcaccagctacaagatctgcaccgacaagatgttcttcgtgaagaaccccaccgacaccggccacggcacagtcgtgatgcaagtgaaggtgtccaagggcgctccctgccggatccctgtgatcgtggccgatgatctgacagccgccatcaacaagggcatcctcgtgacagtgaaccctatcgcctccaccaacgatgacgaggtgctgatcgaagtgaaccctcctttcggcgactcctacatcatcgtgggacggggcgacagcagactgacctaccagtggcacaaagagggcagcagcatcggcaagctgttcacccagaccatgaagggcgtggaacggctggccgtgatgggagataccgcctgggatttctctagcgctggcggcttcttcaccagcgtgggcaagggaatccacaccgtgttcggcagcgccttccagggactgttcggcggcctgaactggatcaccaaagtgatcatgggcgctgtgctgatctgggtgggaatcaacacccggaacatgaccatgagcatgtccatgatcctcgtgggagtgattatgatgttcctgagcctgggcgtgggtgcc

SEQ ID NO: 96 - RNA, 2256 nt, synthetic construct
  misc_feature 1..2256: note = Synthetic Polynucleotide
  source 1..2256: mol_type = other RNA
atggaaacccctgcccagctgctgttcctgctgctgctgtggctgcctgataccaccggcgtgacactcgtgcggaagaacagatggctgctgctgaacgtgaccagcgaggacctgggcaagaccttctctgtgggcaccggcaactgcaccaccaacatcctggaagccaagtactggtgccccgacagcatggagtacaactgccccaacctgagccccagagaggaacccgacgacatcgactgctggtgctacggcgtggaaaacgtgcgggtggcctacggcaagtgcgatagcgccggcagaagcagaagaagcaggcgggccatcgacctgcccacccacgaaaaccacggcctgaaaacccggcaggaaaagtggatgaccggccggatgggcgagcggcagctgcagaaaattgagcggtggtttgtgcggaaccccttcttcgccgtgaccgccctgacaatcgcctacctcgtgggcagcaacatgacccagagagtcgtgatcgccctgctggtgctggctgtgggccctgcctatagcgccattgatctgcctacacacgagaatcatgggctgaaaacaagacaggagaaatggatgactgggcgcatgggagaaagacagctgcagaaaatcgaacggtggttcgtgcgcaatccgttctttgctgtgactgctctgaccattgcctatctcgtgggatccaatatgacacagcgggtcgtgattgctctgctggtgctggcagtgggacccgcttactccgcccactgtatcggcatcaccgaccgggacttcatcgagggcgtgcacggcggaacatgggtgtccgctaccctggaacaggataagtgcgtgaccgtgatggcccccgacaagcccagcctggacatcagcctggaaaccgtggccatcgatagacccgccgaagtgcggaaagtgtgctacaacgccgtgctgacccacgtgaagatcaacgacaagtgccccagcaccggcgaagcccacctggccgaagagaacgagggcgacaacgcctgcaagcggacctacagcgatagaggctggggcaatggctgcggcctgtttggcaagggcagcatcgtggcctgcgccaagttcacctgtgccaagagcatgagcctgttcgaggtggaccagaccaagatccagtacgtgatccgggctcagctgcacgtgggcgccaagcaggaaaactggaacaccgacatcaagaccctgaagttcgacgccctgagcggctcccaggaagtggaattcatcggctatggcaaggccaccctggaatgtcaggtgcagaccgccgtggacttcggcaacagctatatcgccgagatggaaaccgagagctggatcgtggaccggcagtgggcccaggatctgacactgccttggcagtctggctctggcggagtgtggcgggaaatgcaccacctggtggaattcgagcctccccacgccgccaccattagagtgctggccctgggcaatcaggaaggctctctgaaaacagccctgaccggcgccatgagagtgaccaaggacaccaacgacaacaacctgtacaagctgcacggggggcacgtgtcctgcagagtgaaactgtctgccctgacactgaagggcaccagctacaagatctgcaccgacaagatgttcttcgtgaagaaccccaccgacaccggccacggcacagtcgtgatgcaagtgaaggtgtccaagggcgctccctgccggatccctgtgatcgtggccgatgatctgacagccgccatcaacaagggcatcctcgtgacagtgaaccctatcgcctccaccaacgatgacgaggtgctgatcgaagtgaaccctcctttcggcgactcctacatcatcgtgggacggggcgacagcagactgacctaccagtggcacaaagagggcagcagcatcggcaagctgttcacccagaccatgaagggcgtggaacggctggccgtgatgggagataccgcctgggatttctctagcgctggcggcttcttcaccagcgtgggcaagggaatccacaccgtgttcggcagcgccttccagggactgttcggcggcctgaactggatcaccaaagtgatcatgggcgctgtgctgatctgggtgggaatcaacacccggaacatgaccatgagcatgtccatgatcctcgtgggagtgattatgatgttcctgagcctgggcgtgggtgcc

SEQ ID NO: 97 - protein, 677 aa, unidentified
  source 1..677: note = Yellow Fever Virus
METPAQLLFLLLLWLPDTTGVTLVRKNRWLLLNVTSEDLGKTFSVGTGNCTTNILEAKYWCPDSMEYNCPNLSPREEPDDIDCWCYGVENVRVAYGKCDSAGRSRRSRRAIDLPTHENHGLKTRQEKWMTGRMGERQLQKIERWLVRNPFFAVTALTIAYLVGSNMTQRVVIALLVLAVGPAYSAHCIGITDRDFIEGVHGGTWVSATLEQDKCVTVMAPDKPSLDISLETVAIDGPAEARKVCYNAVLTHVKINDKCPSTGEAHLAEENEGDNACKRTYSDRGWGNGCGLFGKGSIVACAKFTCAKSMSLFEVDQTKIQYVIRAQLHVGAKQENWNTDIKTLKFDALSGSQEAEFTGYGKATLECQVQTAVDFGNSYIAEMEKESWIVDRQWAQDLTLPWQSGSGGVWREMHHLVEFEPPHAATIRVLALGNQEGSLKTALTGAMRVTKDTNDNNLYKLHGGHVSCRVKLSALTLKGTSYKMCTDKMSFVKNPTDTGHGTVVMQVKVPKGAPCRIPVIVADDLTAAINKGILVTVNPIASTNDDEVLIEVNPPFGDSYIIVGTGDSRLTYQWHKEGSSIGKLFTQTMKGAERLAVMGDAAWDFSSAGGFFTSVGKGIHTVFGSAFQGLFGGLSWITKVIMGAVLIWVGINTRNMTMSMSMILVGVIMMFLSLGVGA

SEQ ID NO: 98 - protein, 672 aa, unidentified
  source 1..672: note = Yellow Fever Virus
MWLVSLAIVTACAGAVTLVRKNRWLLLNVTSEDLGKTFSVGTGNCTTNILEAKYWCPDSMEYNCPNLSPREEPDDIDCWCYGVENVRVAYGKCDSAGRSRRSRRAIDLPTHENHGLKTRQEKWMTGRMGERQLQKIERWLVRNPFFAVTALTIAYLVGSNMTQRVVIALLVLAVGPAYSAHCIGITDRDFIEGVHGGTWVSATLEQDKCVTVMAPDKPSLDISLETVAIDGPAEARKVCYNAVLTHVKINDKCPSTGEAHLAEENEGDNACKRTYSDRGWGNGCGLFGKGSIVACAKFTCAKSMSLFEVDQTKIQYVIRAQLHVGAKQENWNTDIKTLKFDALSGSQEAEFTGYGKATLECQVQTAVDFGNSYIAEMEKESWIVDRQWAQDLTLPWQSGSGGVWREMHHLVEFEPPHAATIRVLALGNQEGSLKTALTGAMRVTKDTNDNNLYKLHGGHVSCRVKLSALTLKGTSYKMCTDKMSFVKNPTDTGHGTVVMQVKVPKGAPCRIPVIVADDLTAAINKGILVTVNPIASTNDDEVLIEVNPPFGDSYIIVGTGDSRLTYQWHKEGSSIGKLFTQTMKGAERLAVMGDAAWDFSSAGGFFTSVGKGIHTVFGSAFQGLFGGLSWITKVIMGAVLIWVGINTRNMTMSMSMILVGVIMMFLSLGVGA

SEQ ID NO: 99 - protein, 672 aa, unidentified
  source 1..672: note = Yellow Fever Virus
MWLVSLAIVTACAGAVTLVRKNRWLLLNVTSEDLGKTFSVGTGNCTTNILEAKYWCPDSMEYNCPNLSPREEPDDIDCWCYGVENVRVAYGKCDSAGRSRRSRRAIDLPTHENHGLKTRQEKWMTGRMGERQLQKIERWLVRNPFFAVTALTIAYLVGSNMTQRVVIALLVLAVGPAYSAHCIGITDRDFIEGVHGGTWVSATLEQDKCVTVMAPDKPSLDISLETVAIDGPAEARKVCYNAVLTHVKINDKCPSTGEAHLAEENEGDNACKRTYSDRGWGNGCGLFGKGSIVACAKFTCAKSMSLFEVDQTKIQYVIRAQLHVGAKQENWTTDIKTLKFDALSGSQEAEFTGYGKATLECQVQTAVDFGNSYIAEMEKESWIVDRQWAQDLTLPWQSGSGGVWREMHHLVEFEPPHAATIRVLALGNQEGSLKTALTGAMRVTKDTNDNNLYKLHGGHVSCRVKLSALTLKGTSYKMCTDKMSFVKNPTDTGHGTVVMQVKVPKGAPCRIPVIVADDLTAAINKGILVTVNPIASTNDDEVLIEVNPPFGDSYIIVGTGDSRLTYQWHKEGSSIGKLFTQTMKGAERLAVMGDAAWDFSSAGGFFTSVGKGIHTVFGSAFQGLFGGLSWITKVIMGAVLIWVGINTRNMTMSMSMILVGVIMMFLSLGVGA

SEQ ID NO: 100 - protein, 747 aa, unidentified
  source 1..747: note = Yellow Fever Virus
MWLVSLAIVTACAGAVTLVRKNRWLLLNVTSEDLGKTFSVGTGNCTTNILEAKYWCPDSMEYNCPNLSPREEPDDIDCWCYGVENVRVAYGKCDSAGRSRRSRRAIDLPTHENHGLKTRQEKWMTGRMGERQLQKIERWFVRNPFFAVTALTIAYLVGSNMTQRVVIALLVLAVGPAYSAIDLPTHENHGLKTRQEKWMTGRMGERQLQKIERWFVRNPFFAVTALTIAYLVGSNMTQRVVIALLVLAVGPAYSAHCIGITDRDFIEGVHGGTWVSATLEQDKCVTVMAPDKPSLDISLETVAIDRPAEVRKVCYNAVLTHVKINDKCPSTGEAHLAEENEGDNACKRTYSDRGWGNGCGLFGKGSIVACAKFTCAKSMSLFEVDQTKIQYVIRAQLHVGAKQENWNTDIKTLKFDALSGSQEVEFIGYGKATLECQVQTAVDFGNSYIAEMETESWIVDRQWAQDLTLPWQSGSGGVWREMHHLVEFEPPHAATIRVLALGNQEGSLKTALTGAMRVTKDTNDNNLYKLHGGHVSCRVKLSALTLKGTSYKICTDKMFFVKNPTDTGHGTVVMQVKVSKGAPCRIPVIVADDLTAAINKGILVTVNPIASTNDDEVLIEVNPPFGDSYIIVGRGDSRLTYQWHKEGSSIGKLFTQTMKGVERLAVMGDTAWDFSSAGGFFTSVGKGIHTVFGSAFQGLFGGLNWITKVIMGAVLIWVGINTRNMTMSMSMILVGVIMMFLSLGVGA

SEQ ID NO: 101 - protein, 752 aa, unidentified
  source 1..752: note = Yellow Fever Virus
METPAQLLFLLLLWLPDTTGVTLVRKNRWLLLNVTSEDLGKTFSVGTGNCTTNILEAKYWCPDSMEYNCPNLSPREEPDDIDCWCYGVENVRVAYGKCDSAGRSRRSRRAIDLPTHENHGLKTRQEKWMTGRMGERQLQKIERWFVRNPFFAVTALTIAYLVGSNMTQRVVIALLVLAVGPAYSAIDLPTHENHGLKTRQEKWMTGRMGERQLQKIERWFVRNPFFAVTALTIAYLVGSNMTQRVVIALLVLAVGPAYSAHCIGITDRDFIEGVHGGTWVSATLEQDKCVTVMAPDKPSLDISLETVAIDRPAEVRKVCYNAVLTHVKINDKCPSTGEAHLAEENEGDNACKRTYSDRGWGNGCGLFGKGSIVACAKFTCAKSMSLFEVDQTKIQYVIRAQLHVGAKQENWNTDIKTLKFDALSGSQEVEFIGYGKATLECQVQTAVDFGNSYIAEMETESWIVDRQWAQDLTLPWQSGSGGVWREMHHLVEFEPPHAATIRVLALGNQEGSLKTALTGAMRVTKDTNDNNLYKLHGGHVSCRVKLSALTLKGTSYKICTDKMFFVKNPTDTGHGTVVMQVKVSKGAPCRIPVIVADDLTAAINKGILVTVNPIASTNDDEVLIEVNPPFGDSYIIVGRGDSRLTYQWHKEGSSIGKLFTQTMKGVERLAVMGDTAWDFSSAGGFFTSVGKGIHTVFGSAFQGLFGGLNWITKVIMGAVLIWVGINTRNMTMSMSMILVGVIMMFLSLGVGA

SEQ ID NO: 102 - protein, 657 aa, unidentified
  source 1..657: note = Yellow Fever Virus
VTLVRKNRWLLLNVTSEDLGKTFSVGTGNCTTNILEAKYWCPDSMEYNCPNLSPREEPDDIDCWCYGVENVRVAYGKCDSAGRSRRSRRAIDLPTHENHGLKTRQEKWMTGRMGERQLQKIERWLVRNPFFAVTALTIAYLVGSNMTQRVVIALLVLAVGPAYSAHCIGITDRDFIEGVHGGTWVSATLEQDKCVTVMAPDKPSLDISLETVAIDGPAEARKVCYNAVLTHVKINDKCPSTGEAHLAEENEGDNACKRTYSDRGWGNGCGLFGKGSIVACAKFTCAKSMSLFEVDQTKIQYVIRAQLHVGAKQENWNTDIKTLKFDALSGSQEAEFTGYGKATLECQVQTAVDFGNSYIAEMEKESWIVDRQWAQDLTLPWQSGSGGVWREMHHLVEFEPPHAATIRVLALGNQEGSLKTALTGAMRVTKDTNDNNLYKLHGGHVSCRVKLSALTLKGTSYKMCTDKMSFVKNPTDTGHGTVVMQVKVPKGAPCRIPVIVADDLTAAINKGILVTVNPIASTNDDEVLIEVNPPFGDSYIIVGTGDSRLTYQWHKEGSSIGKLFTQTMKGAERLAVMGDAAWDFSSAGGFFTSVGKGIHTVFGSAFQGLFGGLSWITKVIMGAVLIWVGINTRNMTMSMSMILVGVIMMFLSLGVGA

SEQ ID NO: 103 - protein, 657 aa, unidentified; identical to SEQ ID NO: 102
  source 1..657: note = Yellow Fever Virus

SEQ ID NO: 104 - protein, 657 aa, unidentified
  source 1..657: note = Yellow Fever Virus
VTLVRKNRWLLLNVTSEDLGKTFSVGTGNCTTNILEAKYWCPDSMEYNCPNLSPREEPDDIDCWCYGVENVRVAYGKCDSAGRSRRSRRAIDLPTHENHGLKTRQEKWMTGRMGERQLQKIERWLVRNPFFAVTALTIAYLVGSNMTQRVVIALLVLAVGPAYSAHCIGITDRDFIEGVHGGTWVSATLEQDKCVTVMAPDKPSLDISLETVAIDGPAEARKVCYNAVLTHVKINDKCPSTGEAHLAEENEGDNACKRTYSDRGWGNGCGLFGKGSIVACAKFTCAKSMSLFEVDQTKIQYVIRAQLHVGAKQENWTTDIKTLKFDALSGSQEAEFTGYGKATLECQVQTAVDFGNSYIAEMEKESWIVDRQWAQDLTLPWQSGSGGVWREMHHLVEFEPPHAATIRVLALGNQEGSLKTALTGAMRVTKDTNDNNLYKLHGGHVSCRVKLSALTLKGTSYKMCTDKMSFVKNPTDTGHGTVVMQVKVPKGAPCRIPVIVADDLTAAINKGILVTVNPIASTNDDEVLIEVNPPFGDSYIIVGTGDSRLTYQWHKEGSSIGKLFTQTMKGAERLAVMGDAAWDFSSAGGFFTSVGKGIHTVFGSAFQGLFGGLSWITKVIMGAVLIWVGINTRNMTMSMSMILVGVIMMFLSLGVGA

SEQ ID NO: 105 - protein, 732 aa, unidentified
  source 1..732: note = Yellow Fever Virus
VTLVRKNRWLLLNVTSEDLGKTFSVGTGNCTTNILEAKYWCPDSMEYNCPNLSPREEPDDIDCWCYGVENVRVAYGKCDSAGRSRRSRRAIDLPTHENHGLKTRQEKWMTGRMGERQLQKIERWFVRNPFFAVTALTIAYLVGSNMTQRVVIALLVLAVGPAYSAIDLPTHENHGLKTRQEKWMTGRMGERQLQKIERWFVRNPFFAVTALTIAYLVGSNMTQRVVIALLVLAVGPAYSAHCIGITDRDFIEGVHGGTWVSATLEQDKCVTVMAPDKPSLDISLETVAIDRPAEVRKVCYNAVLTHVKINDKCPSTGEAHLAEENEGDNACKRTYSDRGWGNGCGLFGKGSIVACAKFTCAKSMSLFEVDQTKIQYVIRAQLHVGAKQENWNTDIKTLKFDALSGSQEVEFIGYGKATLECQVQTAVDFGNSYIAEMETESWIVDRQWAQDLTLPWQSGSGGVWREMHHLVEFEPPHAATIRVLALGNQEGSLKTALTGAMRVTKDTNDNNLYKLHGGHVSCRVKLSALTLKGTSYKICTDKMFFVKNPTDTGHGTVVMQVKVSKGAPCRIPVIVADDLTAAINKGILVTVNPIASTNDDEVLIEVNPPFGDSYIIVGRGDSRLTYQWHKEGSSIGKLFTQTMKGVERLAVMGDTAWDFSSAGGFFTSVGKGIHTVFGSAFQGLFGGLNWITKVIMGAVLIWVGINTRNMTMSMSMILVGVIMMFLSLGVGA

SEQ ID NO: 106 - protein, 732 aa, unidentified; identical to SEQ ID NO: 105
  source 1..732: note = Yellow Fever Virus

SEQ ID NO: 107 - protein, 672 aa, unidentified; identical to SEQ ID NO: 99
  source 1..672: note = Yellow Fever Virus

SEQ ID NO: 108 - protein, 752 aa, unidentified; identical to SEQ ID NO: 101
  source 1..752: note = Yellow Fever Virus

SEQ ID NO: 109 - protein, 747 aa, unidentified; identical to SEQ ID NO: 100
  source 1..747: note = Yellow Fever Virus

SEQ ID NO: 110 - protein, 672 aa, unidentified; identical to SEQ ID NO: 98
  source 1..672: note = Yellow Fever Virus

SEQ ID NO: 111 - protein, 677 aa, unidentified; identical to SEQ ID NO: 97
  source 1..677: note = Yellow Fever Virus

SEQ ID NO: 112 - protein, 747 aa, synthetic construct
  REGION 1..747: note = Synthetic Polynucleotide
MWLVSLAIVTACAGAVTLVRKNRWLLLNVTSEDLGKTFSVGTGNCTTNILEAKYWCPDSMEYNCPNLSPREEPDDIDCWCYGVENVRVAYGKCDSAGRSRRSRRAIDLPTHENHGLKTRQEKWMTGRMGERQLQKIERWFVRNPFFAVTALTIAYLVGSNMTQRVVIALLVLAVGPAYSAIDLPTHENHGLKTRQEKWMTGRMGERQLQKIERWFVRNPFFAVTALTIAYLVGSNMTQRVVIALLVLAVGPAYSAHCIGITDRDFIEGVHGGTWVSATLEQDKCVTVMAPDKPSLDISLETVAIDRPAEVRKVCYNAVLTHVKINDKCPREGEAHLAEENEGDNACKRTYSDRGRGNGCGRFGKGSIVACAKFTCAKSMSLFEVDQTKIQYVIRAQLHVGAKQENWNTDIKTLKFDALSGSQEVEFIGYGKATLECQVQTAVDFGNSYIAEMETESWIVDRQWAQDLTLPWQSGSGGVWREMHHLVEFEPPHAATIRVLALGNQEGSLKTALTGAMRVTKDTNDNNLYKLHGGHVSCRVKLSALTLKGTSYKICTDKMFFVKNPTDTGHGTVVMQVKVSKGAPCRIPVIVADDLTAAINKGILVTVNPIASTNDDEVLIEVNPPFGDSYIIVGRGDSRLTYQWHKEGSSIGKLFTQTMKGVERLAVMGDTAWDFSSAGGFFTSVGKGIHTVFGSAFQGLFGGLNWITKVIMGAVLIWVGINTRNMTMSMSMILVGVIMMFLSLGVGA

SEQ ID NO: 113 - protein, 752 aa, synthetic construct
  REGION 1..752: note = Synthetic Polynucleotide
METPAQLLFLLLLWLPDTTGVTLVRKNRWLLLNVTSEDLGKTFSVGTGNCTTNILEAKYWCPDSMEYNCPNLSPREEPDDIDCWCYGVENVRVAYGKCDSAGRSRRSRRAIDLPTHENHGLKTRQEKWMTGRMGERQLQKIERWFVRNPFFAVTALTIAYLVGSNMTQRVVIALLVLAVGPAYSAIDLPTHENHGLKTRQEKWMTGRMGERQLQKIERWFVRNPFFAVTALTIAYLVGSNMTQRVVIALLVLAVGPAYSAHCIGITDRDFIEGVHGGTWVSATLEQDKCVTVMAPDKPSLDISLETVAIDRPAEVRKVCYNAVLTHVKINDKCPREGEAHLAEENEGDNACKRTYSDRGRGNGCGRFGKGSIVACAKFTCAKSMSLFEVDQTKIQYVIRAQLHVGAKQENWNTDIKTLKFDALSGSQEVEFIGYGKATLECQVQTAVDFGNSYIAEMETESWIVDRQWAQDLTLPWQSGSGGVWREMHHLVEFEPPHAATIRVLALGNQEGSLKTALTGAMRVTKDTNDNNLYKLHGGHVSCRVKLSALTLKGTSYKICTDKMFFVKNPTDTGHGTVVMQVKVSKGAPCRIPVIVADDLTAAINKGILVTVNPIASTNDDEVLIEVNPPFGDSYIIVGRGDSRLTYQWHKEGSSIGKLFTQTMKGVERLAVMGDTAWDFSSAGGFFTSVGKGIHTVFGSAFQGLFGGLNWITKVIMGAVLIWVGINTRNMTMSMSMILVGVIMMFLSLGVGA

SEQ ID NO: 114 - protein, 747 aa, synthetic construct; identical to SEQ ID NO: 112
  REGION 1..747: note = Synthetic Polynucleotide

SEQ ID NO: 115 - protein, 747 aa, synthetic construct; identical to SEQ ID NO: 100
  REGION 1..747: note = Synthetic Polynucleotide

SEQ ID NO: 116 - protein, 752 aa, synthetic construct; identical to SEQ ID NO: 113
  REGION 1..752: note = Synthetic Polynucleotide

SEQ ID NO: 117 - protein, 752 aa, synthetic construct; identical to SEQ ID NO: 101
  REGION 1..752: note = Synthetic Polynucleotide

SEQ ID NO: 118 - DNA, 10254 bp, unidentified
  source 1..10254: mol_type = genomic DNA; note = Zika Virus
atgaaaaacccaaagaagaaatccggaggattccggattgtcaatatgctaaaacgcggagtagcccgtgtaaaccccttgggaggtttgaagaggctgccagccggacttctgctgggtcatggacccatcagaatggttttggcgatattagcctttttgagattcacagcaatcaagccatcactgggcctcatcaacagatggggtaccgtggggaaaaaagaggctatggaaataataaaaaaatttaagaaagatcttgctgccatgttgagaataatcaatgctaggaaggagaggaagagacgtggcgcagacaccagcatcggaatcgttggcctcctgttgactacagccatggcagcagagatcactagacgtgggagtgcatactacatgtacttggataggagcgatgcagggaaggccatttctttcgctaccacattgggggtgaacaaatgccatgtgcagatcatggacctcgggcacatgtgtgacgccaccatgagctatgaatgccctatgctggacgagggggtggaaccagatgacgtcgattgctggtgcaacacgacatcaacttgggttgtgtacggaacctgtcatcataaaaaaggtgaagcacggcgatctagaagagccgtcacgctcccatctcactccacaaggaaattgcaaacgcggtcgcagacttggctagaatcaagagaatacacaaagcacctgatcaaggttgaaaattggatattcaggaaccctggttttacgctagtggctgtcgccatcgcctggcttttgggaagctcgacgagccaaaaagtcatatacttggtcatgatactgctgattgccccggcatacagtatcaggtgcataggagtcagcaatagagacttcgtggagggcatgtcaggtgggacctgggttgacgttgtcctggaacatggaggctgcgtcaccgtgatggcacaggacaagccaacagttgacatagagctggtcacaacaacggttagtaacatggccgaggtgagatcctattgttacgaggcatcaatatcggacatggcttcggacagtcgctgcccaacacaaggtgaagcctaccttgacaagcaatcagacactcaatatgtttgcaaaagaacattggtggacagaggttggggaaatgggtgtggactctttggcaaagggagtttggtgacatgtgctaagttcacgtgctccaagaagatgactgggaagagcattcagccggagaacctggagtatcggataatgctatcagtgcatggctcccagcacagtgggatgattgttaatgatgaaaacagagcgaaggtcgaggttacgcccaattcaccaagagcagaagcaaccctgggaggctttggaagcttaggacttgattgtgaaccaaggacaggccttgacttttcagatctgtattacctaaccatgaataacaagcattggttggtgcacaaagagtggtttcatgacatcccattgccctggcatgctggggcagacactggaactccacattggaacaacaaggaggcattagtggaattcaaggacgcccacgccaagaggcaaaccgtcgtggttttggggagccaggaaggagccgtccacacggctcttgctggagctctagaggctgagatggatggtgcaaagggaaggctattctctggccacttgaaatgtcgcttaaaaatggacaagcttagattgaagggcgtgtcatattccttgtgcaccgcggcattcacattcaccaaggtcccggctgaaacactacatggaacagtcacagtggaggtgcagtatgcagggacagatggaccctgcaaggtcccagcccagatggcggtggacatgcagaccttgaccccagtcggaaggctgataaccgccaaccccgtgattactgaaagcactgagaattcaaagatgatgttggagctcgacccaccatttggggattcttacattgtcataggagttggggataagaaaatcacccatcactggcataggagtggcagcaccattggaaaagcatttgaagccactgtgagaggcgctaagagaatggcagtcctgggggacacagcttgggactttggatcagtcggaggtgtgtttaactcattgggcaagggcattcatcagatttttggagcagctttcaaatcactgtttggaggaatgtcctggttctcacagatcctcataggcactctgctggtgtggttaggtctgaacacaaagaatgggtctatctccctcacatgcttagccctggggggagtgatgatcttcctctccacggctgtttctgctgacgtggggtgctcggtggacttctcaaaaaaagaaacgagatgtggcacgggggtgttcgtctacaatgacgttgaagcctggagggaccggtacaagtaccatcctgactcccctcgtagactggcagcagccgttaagcaagcttgggaagaggggatttgtgggatctcctctgtttctagaatggaaaacataatgtggaaatcagtggaaggagagctcaatgcaatcctagaggagaatggagtccaactgacagttgttgtgggatctgtaaaaaaccccatgtggagaggcccacaaagattgccagtgcctgtgaatgagctgccccatggctggaaagcctgggggaaatcgtactttgttagggcggcaaagaccaacaacagttttgttgtcgacggtgacacattgaaggaatgtccgctcaagcacagagcatggaacagcttcctcgtggaggatcacgggtttggggtcttccacaccagtgtttggcttaaggttagagaagattactcactggagtgtgacccagccgtcataggaacagctgttaagggaaaggaggccgcgcacagtgatctaggctattggattgaaagtgaaaagaatgacacatggaggctgaagagggctcatttgattgagatgaaaacatgtgagtggccaaagtctcacacactgtggacagatggagtggaagaaagtgatctgatcatacccaagtctttagctggtccactcagccaccacaacaccagagagggttacagaactcaagtgaaagggccatggcatagtgaggagcttgaaatccgatttgaggaatgtccaggtaccaaggttcatgtggaggagacatgcggaacgagaggaccatctctgagatcaaccactgcaagcggaagggtcattgaggaatggtgctgtagggaatgcacaatgcccccactatcgttccgagcaaaagatggctgctggtatggaatggagataaggcctaggaaagaaccagagagcaacttagtgaggtcaatggtgacagcgggatcaaccgatcatatggatcatttttctcttggagtgcttgtgattctactcatggtgcaggaagggttgaagaagagaatgaccacaaagatcatcatgagcacatcaatggcagtgctggtggccatgatcttgggaggattctcaatgagtgacctggctaagcttgtgatcctgatgggggccactttcgcagaaatgaacactggaggagacgtagctcacttggcattagtagcggcatttaaagtcagaccagccttgctggtctcatttatcttcagagccaactggacacctcgtgagagcatgctgctagccttggcttcgtgtcttctgcaaactgcgatctccgctcttgaaggcgacttgatggtcctcgttaatggatttgctttggcctggttggcaatacgtgcaatggccgtgccacgcactgacaacatcgctctagcaattctggctgctctaacaccactagcccgaggcacactgctcgtggcatggagagcgggcctcgccacttgtggagggttcatgctcctctccctgaaagggaaaggtagtgtgaagaagaacctgccattcgtcgcggccttgggattgaccgctgtgagaatagtggaccccattaatgtggtgggactactgttactcacaaggagtgggaagcggagctggccccctagtgaagtgctcactgctgtcggcctgatatgtgcattggccggagggtttgccaaggcagacatagagatggctgggcccatggcggcagtgggcctgctaattgtcagttatgtggtctcgggaaagagtgtagatatgtacattgaaagagcaggtgacatcacatgggagaaagacgcggaagtcactggaaacagtcctcggcttgacgtggcactagatgagagtggtgatttctctctggtggaggaagatggtccacccatgagagagatcatacttaaggtggtcttgatggccatctgtggcatgaacccaatagccataccttttgctgcaggagcgtggtatgtgtatgtgaagactgggaaaaggagtggtgccctctgggacgtgcctgctccgaaagaagtgaaaaaaggagagaccacagatggagtgtacagagtgatgactcgcagactgctgggttcaacacaagttggagtgggagtcatgcaggagggagtcttccacaccatgtggcacgtcacaaaaggggccgcattgaggagcggtgaagggagacttgatccatactggggggatgtcaagcaggacttggtgtcatattgtgggccttggaagctggacgcagcttgggacggagttagtgaggtgcagcttctggccgtaccccctggagagagagccagaaacattcagactctgcctggaatatttaagacaaaggatggggacatcggagcagttgctttggactatcctgcaggaacctcaggatctccgatcctagacaaatgcgggagagtgataggactctatggcaatggggttgtgatcaagaacggaagctatgttagtgctataacccagggaaagagggaggaggagactccggttgagtgttttgaaccctcgatgctgaagaagaagcagctaactgtcctggacctgcatccaggggctgggaaaaccaggagagttcttcctgaaatagtccgtgaagctataaagaagagactccgcacggtgatcttggcaccaaccagggtcgtcgctgctgagatggaggaagccctgagaggacttccggtgcgttacatgacaacagcagtcaaggtcacccattctgggacagaaatcgttgatttgatgtgccatgccaccttcacttcacgcctactacaacccattagagtccctaattacaacctctacatcatggatgaagcccatttcacagacccctcaagcatagctgcaagaggatatatatcaacaagggttgagatgggcgaggcagcagccatctttatgactgccacaccaccaggaacccgcgatgcgtttccagattccaactcaccaatcatggacacagaagtggaagtcccagagagagcctggagctcaggctttgattgggtgacggaccattctgggaaaacagtttggttcgttccaagcgtgaggaatggaaatgaaatcgcagcctgtctgacaaaggctggaaagcgggttatacagcttagtaggaaaacttttgagacagagtttcagaaaacaaaaaatcaagagtgggactttgtcataacaactgacatctcagagatgggtgccaacttcaaggctgaccgggttatagattccaggagatgcctaaagccagttatacttgatggtgagagagtcatcttggctgggcccatgcctgtcacgcatgctagcgctgctcagaggagaggacgtataggcaggaaccccaacaagcctggagatgagtacatgtatggaggtgggtgtgcggagactgatgaagaccatgcacattggcttgaagcaagaatgcttcttgacaacatttacctccaggatggcctcatagcctcgctctatcgacctgaggccgacaaggtagccgccattgagggagagtttaagctgaggacagagcaaaggaagacctttgtggaactcatgaagagaggagatcttcccgtttggttggcctaccaggttgcatctgccggaataacttatacagacagaagatggtgttttgatggcacaaccaacaacaccataatggaagacagtgtaccagcagaggtgtggaccaagtatggagagaagagagtgctcaaaccaagatggatggacgccagggtctgctcagatcatgcggccctgaagtcgttcaaagaattcgccgctgggaaaagaggagcggctttgggagtaatggaggccctgggaacattaccaggacacatgacagagaggtttcaggaagccattgataacctcgctgtgctcatgcgagcagagactggaagcaggccctacaaggcagcggcagcccaattgccggagaccctagagaccatcatgcttttaggcctgctgggaacagtatcgctggggatcttttttgtcttgatgaggaacaagggcatcgggaagatgggctttgaaatggtaacccttggggccagcgcatggctcatgtggctctcagaaatcgaaccagccagaattgcatgtgtccttattgttgtgtttttattactggtggtgctaataccagagccagagaagcaaagatccccccaggacaatcagatggcaatcattattatggtggcagtgggccttttggggttgataactgcaaatgaacttggatggctggagagaacaaaaaatgacatagctcatctgatgggaaagagagaagagggaacaaccgtgggattctcaatggacatcgatctgcgaccagcctccgcatgggctatttatgccgcattgacaaccctcatcaccccagccgtccagcacgcggtaactacctcgtacaacaactactccttaatggcgatggccacacaagctggagtgctgtttggcatgggcaaagggatgccattttatgcatgggacttaggagtcccgttgctaatgatgggctgctactcacaactaacacccctgaccctgatagtagccatcattttgcttgtggcacattacatgtacttgatcccaggcctacaggcagcagcagcacgcgctgcccagaagagaacagcagccggcatcatgaagaatcccgttgtggatggaatagtggtaactgacattgacacaatgacaattgacccccaagtggagaagaagatgggacaagtgctacttatagcagtggctgtctccagtgctgtgttgctgcggaccgcttggggatggggggaggctggagctttgatcacagcagcaacttccaccctgtgggaaggctccccaaacaaatactggaactcctccacagccacctcactgtgcaacatcttcagaggaagttacttggcaggagcttcccttatttacacagtgacaagaaatgccggcctggttaagagacgtggaggtggaacgggagaaactctgggagagaagtggaaagcccgcctgaatcagatgtcggccttggagttctactcttacaaaaagtcaggcatcactgaagtatgtagagaggaggctcgccgcgccctcaaggatggagtggccacaggaggacatgctgtatcccgaggaagcgcaaaactcagatggttggtggagagaggatatctgcagccctatggaaaggttgttgatctcggatgcggcagagggggctggagttattatgccgccaccatccgcaaagtgcaggaggtgagaggatacacaaagggaggtcccggtcatgaagagcccatgctggtgcaaagctatgggtggaacataattcgtctcaagagtggagtggacgtcttccacatggcggctgagtcgtgtgacactttgctgtgtgacataggtgagtcatcatccagtcctgaagtggaggagacgcgaacactcagagtgctctccatggtgggggactggcttgagaagagaccaggggccttctgcataaaggtgttatgcccatacaccagcaccatgatggagaccatggagcgactgcaacgtaggtatgggggaggactagtcagagtgccactgtcccgcaattctacacatgagatgtattgggtctctggagcaaaaagtaacatcataaaaagtgtgtccaccacaagtcagctcctcctgggacgcatggatgggcccaggaggccagtgaagtatgaggaggatgtgaacctcggctcaggcacacgagctgtggcaagctgtgctgaggctcccaacatgaaggtcattggtaggcgcattgagagaatccgtagtgaacatgcagaaacatggttctttgatgaaaaccatccatacaggacatgggcctaccacgggagctacgaagcccccacgcaagggtcagcatcttccctcgtgaatggggttgttagactcctgtcaaagccctgggatgtggtgactggagttacaggaatagctatgactgacaccacaccgtacggccaacaaagagtcttcaaagaaaaagtggacaccagggtgccagaccctcaagaaggtactcgccaggtaatgaacatggtcgcttcctggctgtggaaggagctgggaaaacgtaagcggccacgtgtctgcaccaaagaagagttcatcaacaaggtgcgcagcaatgcagcactgggagcaatatttgaagaggaaaaagaatggaagacggctgtggaagctgtgaatgatccaaggttttgggccctagtggataaggaaagagaacaccacctgagaggagagtgccatagttgtgtgtacaacatgatgggaaaaagagaaaagaagcaaggggaattcgggaaagcaaaaggcagtcgcgccatctggtacatgtggttgggagccagattcttggagtttgaagcccttggattcttgaacgaggaccattggatgggaagagaaaactcaggaggtggtgtcgaagggttgggactgcaaagacttggatacgttctagaagaaatgagccgggcaccaggaggaaagatgtatgcagatgacaccgctggctgggacacccgcattagcaagtttgatttggagaatgaagccttgattactaaccaaatggatgaagggcacagaactctggcgttggccgtgattaagtacacataccaaaacaaagtggtgaaggtcctcagaccagctgaaggaggaaaaacagtcatggacatcatttcaagacaagaccagagggggagcggacaagttgtcacttatgctctcaacacatttaccaacttggtggtgcagctcatccggaacatggaggctgaggaagtgttagagatgcaagacttatggctgttgaggaagccagagaaagtaaccagatggctgcagagtagcggatgggacagactcaaacgaatggcagtcagtggtgatgactgtgttgtaaagccaattgatgacaggtttgcacacgccctcaggttcttgaatgatatggggaaagttaggaaagacacacaggaatggaaaccctcaactggatggagcaactgggaagaagtcccgttctgctcccaccactttaacaagctgcacctcaaagacgggagatccattgtggtcccttgccgccaccaagatgaactgattggccgggctcgcgtttcgccgggggcaggatggagcatccgggagactgcctgtcttgcaaaatcatatgcacagatgtggcagcttctttatttccacagaagagacctccgactgatggccaatgccatttgctcggccgtgccagttgactgggtcccaactgggagaactacctggtcaatccatggaaagggagaatggatgactactgaggacatgctcatggtgtggaatagagtgtggattgaggagaatgatcacatggaggacaagacccctgtaacaaaatggacagacattccctatttgggaaaaagggaggacttatggtgtggatcccttataggacacagacctcgcaccacttgggctgagaacatcaaagacacagtcagcatggtgcgcagaatcataggtgatgaagaaaagtacatggactacctatccactcaagttcgctacttgggtgaggaagggtctacacctggagtgctgtaa

SEQ ID NO: 119 - DNA, 2281 bp, unidentified
  source 1..2281: mol_type = genomic DNA; note = Zika Virus
tcaagcttttggaccctcgtacagaagctaatacgactcactatagggaaataagagagaaaagaagagtaagaagaaatataagagccaccatggactggacctggatcctgttcctggtggccgctgccacaagagtgcacagcgtggaagtgaccagacggggcagcgcctactacatgtacctggacagaagcgacgccggcgaggccatcagctttccaaccaccctgggcatgaacaagtgctacatccagatcatggacctgggccacatgtgcgacgccaccatgagctacgagtgccccatgctggacgagggcgtggaacccgacgatgtggactgctggtgcaacaccaccagcacctgggtggtgtacggcacctgtcaccacaagaagggcgaagccagacggtccagacgggccgtgacactgcctagccacagcaccagaaagctgcagacccggtcccagacctggctggaaagcagagagtacaccaagcacctgatccgggtggaaaactggatcttccggaaccccggctttgccctggctgccgctgctattgcttggctgctgggcagcagcacctcccagaaagtgatctacctcgtgatgatcctgctgatcgcccctgcctacagcatccggtgtatcggcgtgtccaaccgggacttcgtggaaggcatgagcggcggcacatgggtggacgtggtgctggaacatggcggctgcgtgacagtgatggcccaggataagcccgccgtggacatcgagctcgtgaccaccaccgtgtccaatatggccgaagtgcggagctactgctacgaggccagcatcagcgacatggccagcgacagcagatgccctacacagggcgaggcctacctggataagcagtccgacacccagtacgtgtgcaagcggaccctggtggatagaggctggggcaatggctgcggcctgtttggcaagggcagcctcgtgacctgcgccaagttcgcctgcagcaagaagatgaccggcaagagcatccagcccgagaacctggaataccggatcatgctgagcgtgcacggctcccagcacagcggcatgatcgtgaacgacaccggccacgagacagacgagaaccgggccaaggtggaaatcacccccaacagccctagagccgaggccacactgggcggctttggatctctgggcctggactgcgagcctagaaccggcctggatttcagcgacctgtactacctgaccatgaacaacaagcactggctggtgcacaaagagtggttccacgacatccccctgccctggcatgctggcgctgatacaggcaccccccactggaacaacaaagaggctctggtggaattcaaggacgcccacgccaagcggcagaccgtggtggtgctgggatctcaggaaggcgccgtgcatacagctctggctggcgccctggaagccgaaatggatggcgccaaaggcagactgtcctccggccacctgaagtgccggctgaagatggacaagctgcggctgaagggcgtgtcctacagcctgtgtaccgccgccttcaccttcaccaagatccccgccgagacactgcacggcaccgtgactgtggaagtgcagtacgccggcaccgacggcccttgtaaagtgcctgctcagatggccgtggatatgcagaccctgacccccgtgggcagactgatcaccgccaaccctgtgatcaccgagagcaccgagaacagcaagatgatgctggaactggacccccccttcggcgactcctacatcgtgatcggcgtgggagagaagaagatcacccaccactggcacagatccggcagcaccatcggcaaggcctttgaggctacagtgcggggagccaagagaatggccgtgctgggcgataccgcctgggattttggctctgtgggcggagccctgaacagcctgggaaagggcatccaccagatcttcggcgctgccttcaagagcctgttcggcggcatgagctggttcagccagatcctgatcggcaccctgctcgtgtggctgggcctgaacaccaagaacggcagcatctccctgacctgcctggctctgggcggcgtgctgatctttctgagcacagccgtgtccgcctgataataggctggagcctcggtggccatgcttcttgccccttgggcctccccccagcccctcctccccttcctgcacccgtacccccgtggtctttgaataaagtctgagtgggcggc

SEQ ID NO: 120 - DNA, 2070 bp, unidentified
  source 1..2070: mol_type = genomic DNA; note = Zika Virus
atggactggacctggatcctgttcctggtggccgctgccacaagagtgcacagcgtggaagtgaccagacggggcagcgcctactacatgtacctggacagaagcgacgccggcgaggccatcagctttccaaccaccctgggcatgaacaagtgctacatccagatcatggacctgggccacatgtgcgacgccaccatgagctacgagtgccccatgctggacgagggcgtggaacccgacgatgtggactgctggtgcaacaccaccagcacctgggtggtgtacggcacctgtcaccacaagaagggcgaagccagacggtccagacgggccgtgacactgcctagccacagcaccagaaagctgcagacccggtcccagacctggctggaaagcagagagtacaccaagcacctgatccgggtggaaaactggatcttccggaaccccggctttgccctggctgccgctgctattgcttggctgctgggcagcagcacctcccagaaagtgatctacctcgtgatgatcctgctgatcgcccctgcctacagcatccggtgtatcggcgtgtccaaccgggacttcgtggaaggcatgagcggcggcacatgggtggacgtggtgctggaacatggcggctgcgtgacagtgatggcccaggataagcccgccgtggacatcgagctcgtgaccaccaccgtgtccaatatggccgaagtgcggagctactgctacgaggccagcatcagcgacatggccagcgacagcagatgccctacacagggcgaggcctacctggataagcagtccgacacccagtacgtgtgcaagcggaccctggtggatagaggctggggcaatggctgcggcctgtttggcaagggcagcctcgtgacctgcgccaagttcgcctgcagcaagaagatgaccggcaagagcatccagcccgagaacctggaataccggatcatgctgagcgtgcacggctcccagcacagcggcatgatcgtgaacgacaccggccacgagacagacgagaaccgggccaaggtggaaatcacccccaacagccctagagccgaggccacactgggcggctttggatctctgggcctggactgcgagcctagaaccggcctggatttcagcgacctgtactacctgaccatgaacaacaagcactggctggtgcacaaagagtggttccacgacatccccctgccctggcatgctggcgctgatacaggcaccccccactggaacaacaaagaggctctggtggaattcaaggacgcccacgccaagcggcagaccgtggtggtgctgggatctcaggaaggcgccgtgcatacagctctggctggcgccctggaagccgaaatggatggcgccaaaggcagactgtcctccggccacctgaagtgccggctgaagatggacaagctgcggctgaagggcgtgtcctacagcctgtgtaccgccgccttcaccttcaccaagatccccgccgagacactgcacggcaccgtgactgtggaagtgcagtacgccggcaccgacggcccttgtaaagtgcctgctcagatggccgtggatatgcagaccctgacccccgtgggcagactgatcaccgccaaccctgtgatcaccgagagcaccgagaacagcaagatgatgctggaactggacccccccttcggcgactcctacatcgtgatcggcgtgggagagaagaagatcacccaccactggcacagatccggcagcaccatcggcaaggcctttgaggctacagtgcggggagccaagagaatggccgtgctgggcgataccgcctgggattttggctctgtgggcggagccctgaacagcctgggaaagggcatccaccagatcttcggcgctgccttcaagagcctgttcggcggcatgagctggttcagccagatcctgatcggcaccctgctcgtgtggctgggcctgaacaccaagaacggcagcatctccctgacctgcctggctctgggcggcgtgctgatctttctgagcacagccgtgtccgcc

SEQ ID NO: 121 - DNA, 2342 bp, unidentified
  source 1..2342: mol_type = genomic DNA; note = Zika Virus
ggggaaataagagagaaaagaagagtaagaagaaatataagagccaccatggactggacctggatcctgttcctggtggccgctgccacaagagtgcacagcgtggaagtgaccagacggggcagcgcctactacatgtacctggacagaagcgacgccggcgaggccatcagctttccaaccaccctgggcatgaacaagtgctacatccagatcatggacctgggccacatgtgcgacgccaccatgagctacgagtgccccatgctggacgagggcgtggaacccgacgatgtggactgctggtgcaacaccaccagcacctgggtggtgtacggcacctgtcaccacaagaagggcgaagccagacggtccagacgggccgtgacactgcctagccacagcaccagaaagctgcagacccggtcccagacctggctggaaagcagagagtacaccaagcacctgatccgggtggaaaactggatcttccggaaccccggctttgccctggctgccgctgctattgcttggctgctgggcagcagcacctcccagaaagtgatctacctcgtgatgatcctgctgatcgcccctgcctacagcatccggtgtatcggcgtgtccaaccgggacttcgtggaaggcatgagcggcggcacatgggtggacgtggtgctggaacatggcggctgcgtgacagtgatggcccaggataagcccgccgtggacatcgagctcgtgaccaccaccgtgtccaatatggccgaagtgcggagctactgctacgaggccagcatcagcgacatggccagcgacagcagatgccctacacagggcgaggcctacctggataagcagtccgacacccagtacgtgtgcaagcggaccctggtggatagaggctggggcaatggctgcggcctgtttggcaagggcagcctcgtgacctgcgccaagttcgcctgcagcaagaagatgaccggcaagagcatccagcccgagaacctggaataccggatcatgctgagcgtgcacggctcccagcacagcggcatgatcgtgaacgacaccggccacgagacagacgagaaccgggccaaggtggaaatcacccccaacagccctagagccgaggccacactgggcggctttggatctctgggcctggactgcgagcctagaaccggcctggatttcagcgacctgtactacctgaccatgaacaacaagcactggctggtgcacaaagagtggttccacgacatccccctgccctggcatgctggcgctgatacaggcaccccccactggaacaacaaagaggctctggtggaattcaaggacgcccacgccaagcggcagaccgtggtggtgctgggatctcaggaaggcgccgtgcatacagctctggctggcgccctggaagccgaaatggatggcgccaaaggcagactgtcctccggccacctgaagtgccggctgaagatggacaagctgcggctgaagggcgtgtcctacagcctgtgtaccgccgccttcaccttcaccaagatccccgccgagacactgcacggcaccgtgactgtggaagtgcagtacgccggcaccgacggcccttgtaaagtgcctgctcagatggccgtggatatgcagaccctgacccccgtgggcagactgatcaccgccaaccctgtgatcaccgagagcaccgagaacagcaagatgatgctggaactggacccccccttcggcgactcctacatcgtgatcggcgtgggagagaagaagatcacccaccactggcacagatccggcagcaccatcggcaaggcctttgaggctacagtgcggggagccaagagaatggccgtgctgggcgataccgcctgggattttggctctgtgggcggagccctgaacagcctgggaaagggcatccaccagatcttcggcgctgccttcaagagcctgttcggcggcatgagctggttcagccagatcctgatcggcaccctgctcgtgtggctgggcctgaacaccaagaacggcagcatctccctgacctgcctggctctgggcggcgtgctgatctttctgagcacagccgtgtccgcctgataataggctggagcctcggtggccatgcttcttgccccttgggcctccccccagcccctcctccccttcctgcacccgtacccccgtggtctttgaataaagtctgagtgggcggcaaaaaaaaaaaaaaaaaaaaaaaaaaaaaaaaaaaaaaaaaaaaaaaaaaaaaaaaaaaaaaaaaaaaaaaaaaaaaaaaaaaaaaaaaaaaaaaaaaaatctag

SEQ ID NO: 122 - DNA, 2272 bp, unidentified
  source 1..2272: mol_type = genomic DNA; note = Zika Virus
tcaagcttttggaccctcgtacagaagctaatacgactcactatagggaaataagagagaaaagaagagtaagaagaaatataagagccaccatggactggacctggatcctgttcctggtggccgctgccacaagagtgcacagcaccagaagaggcagcgcctactacatgtacctggacagaagcgacgccggcgaggccatcagctttccaaccaccctgggcatgaacaagtgctacatccagatcatggacctgggccacatgtgcgacgccaccatgagctacgagtgccccatgctggacgagggcgtggaacccgacgatgtggactgctggtgcaacaccaccagcacctgggtggtgtacggcacctgtcaccacaagaagggcgaagccagacggtccagacgggccgtgacactgcctagccactccaccagaaagctgcagacccggtcccagacctggctggaaagcagagagtacaccaagcacctgatccgggtggaaaactggatcttccggaaccccggctttgccctggctgccgctgctattgcttggctgctgggcagcagcacctcccagaaagtgatctacctcgtgatgatcctgctgatcgcccctgcctacagcatccggtgtatcggcgtgtccaaccgggacttcgtggaaggcatgagcggcggcacatgggtggacgtggtgctggaacatggcggctgcgtgacagtgatggcccaggataagcccgccgtggacatcgagctcgtgaccaccaccgtgtccaatatggccgaagtgcggagctactgctacgaggccagcatcagcgacatggccagcgacagcagatgccctacacagggcgaggcctacctggataagcagtccgacacccagtacgtgtgcaagcggaccctggtggatagaggctggggcaatggctgcggcctgtttggcaagggcagcctcgtgacctgcgccaagttcgcctgcagcaagaagatgaccggcaagagcatccagcccgagaacctggaataccggatcatgctgagcgtgcacggctcccagcacagcggcatgatcgtgaacgacaccggccacgagacagacgagaaccgggccaaggtggaaatcacccccaacagccctagagccgaggccacactgggcggctttggatctctgggcctggactgcgagcctagaaccggcctggatttcagcgacctgtactacctgaccatgaacaacaagcactggctggtgcacaaagagtggttccacgacatccccctgccctggcatgctggcgctgatacaggcaccccccactggaacaacaaagaggctctggtggaattcaaggacgcccacgccaagcggcagaccgtggtggtgctgggatctcaggaaggcgccgtgcatacagctctggctggcgccctggaagccgaaatggatggcgccaaaggcagactgtcctccggccacctgaagtgccggctgaagatggacaagctgcggctgaagggcgtgtcctacagcctgtgtaccgccgccttcaccttcaccaagatccccgccgagacactgcacggcaccgtgactgtggaagtgcagtacgccggcaccgacggcccttgtaaagtgcctgctcagatggccgtggatatgcagaccctgacccccgtgggcagactgatcaccgccaaccctgtgatcaccgagagcaccgagaacagcaagatgatgctggaactggacccccccttcggcgactcctacatcgtgatcggcgtgggagagaagaagatcacccaccactggcacagatccggcagcaccatcggcaaggcctttgaggctacagtgcggggagccaagagaatggccgtgctgggcgataccgcctgggattttggctctgtgggcggagccctgaacagcctgggaaagggcatccaccagatcttcggagccgcctttaagagcctgttcggcggcatgagctggttcagccagatcctgatcggcaccctgctcgtgtggctgggcctgaacaccaagaacggcagcatctccctgacctgcctggctctgggcggcgtgctgatctttctgagcacagccgtgtccgcctgataataggctggagcctcggtggccatgcttcttgccccttgggcctccccccagcccctcctccccttcctgcacccgtacccccgtggtctttgaataaagtctgagtgggcggc

SEQ ID NO: 123 - DNA, 2061 bp, unidentified
  source 1..2061: mol_type = genomic DNA; note = Zika Virus
atggactggacctggatcctgttcctggtggccgctgccacaagagtgcacagcaccagaagaggcagcgcctactacatgtacctggacagaagcgacgccggcgaggccatcagctttccaaccaccctgggcatgaacaagtgctacatccagatcatggacctgggccacatgtgcgacgccaccatgagctacgagtgccccatgctggacgagggcgtggaacccgacgatgtggactgctggtgcaacaccaccagcacctgggtggtgtacggcacctgtcaccacaagaagggcgaagccagacggtccagacgggccgtgacactgcctagccactccaccagaaagctgcagacccggtcccagacctggctggaaagcagagagtacaccaagcacctgatccgggtggaaaactggatcttccggaaccccggctttgccctggctgccgctgctattgcttggctgctgggcagcagcacctcccagaaagtgatctacctcgtgatgatcctgctgatcgcccctgcctacagcatccggtgtatcggcgtgtccaaccgggacttcgtggaaggcatgagcggcggcacatgggtggacgtggtgctggaacatggcggctgcgtgacagtgatggcccaggataagcccgccgtggacatcgagctcgtgaccaccaccgtgtccaatatggccgaagtgcggagctactgctacgaggccagcatcagcgacatggccagcgacagcagatgccctacacagggcgaggcctacctggataagcagtccgacacccagtacgtgtgcaagcggaccctggtggatagaggctggggcaatggctgcggcctgtttggcaagggcagcctcgtgacctgcgccaagttcgcctgcagcaagaagatgaccggcaagagcatccagcccgagaacctggaataccggatcatgctgagcgtgcacggctcccagcacagcggcatgatcgtgaacgacaccggccacgagacagacgagaaccgggccaaggtggaaatcacccccaacagccctagagccgaggccacactgggcggctttggatctctgggcctggactgcgagcctagaaccggcctggatttcagcgacctgtactacctgaccatgaacaacaagcactggctggtgcacaaagagtggttccacgacatccccctgccctggcatgctggcgctgatacaggcaccccccactggaacaacaaagaggctctggtggaattcaaggacgcccacgccaagcggcagaccgtggtggtgctgggatctcaggaaggcgccgtgcatacagctctggctggcgccctggaagccgaaatggatggcgccaaaggcagactgtcctccggccacctgaagtgccggctgaagatggacaagctgcggctgaagggcgtgtcctacagcctgtgtaccgccgccttcaccttcaccaagatccccgccgagacactgcacggcaccgtgactgtggaagtgcagtacgccggcaccgacggcccttgtaaagtgcctgctcagatggccgtggatatgcagaccctgacccccgtgggcagactgatcaccgccaaccctgtgatcaccgagagcaccgagaacagcaagatgatgctggaactggacccccccttcggcgactcctacatcgtgatcggcgtgggagagaagaagatcacccaccactggcacagatccggcagcaccatcggcaaggcctttgaggctacagtgcggggagccaagagaatggccgtgctgggcgataccgcctgggattttggctctgtgggcggagccctgaacagcctgggaaagggcatccaccagatcttcggagccgcctttaagagcctgttcggcggcatgagctggttcagccagatcctgatcggcaccctgctcgtgtggctgggcctgaacaccaagaacggcagcatctccctgacctgcctggctctgggcggcgtgctgatctttctgagcacagccgtgtccgcc

SEQ ID NO: 124 - DNA, 2333 bp, unidentified
  source 1..2333: mol_type = genomic DNA; note = Zika Virus
ggggaaataagagagaaaagaagagtaagaagaaatataagagccaccatggactggacctggatcctgttcctggtggccgctgccacaagagtgcacagcaccagaagaggcagcgcctactacatgtacctggacagaagcgacgccggcgaggccatcagctttccaaccaccctgggcatgaacaagtgctacatccagatcatggacctgggccacatgtgcgacgccaccatgagctacgagtgccccatgctggacgagggcgtggaacccgacgatgtggactgctggtgcaacaccaccagcacctgggtggtgtacggcacctgtcaccacaagaagggcgaagccagacggtccagacgggccgtgacactgcctagccactccaccagaaagctgcagacccggtcccagacctggctggaaagcagagagtacaccaagcacctgatccgggtggaaaactggatcttccggaaccccggctttgccctggctgccgctgctattgcttggctgctgggcagcagcacctcccagaaagtgatctacctcgtgatgatcctgctgatcgcccctgcctacagcatccggtgtatcggcgtgtccaaccgggacttcgtggaaggcatgagcggcggcacatgggtggacgtggtgctggaacatggcggctgcgtgacagtgatggcccaggataagcccgccgtggacatcgagctcgtgaccaccaccgtgtccaatatggccgaagtgcggagctactgctacgaggccagcatcagcgacatggccagcgacagcagatgccctacacagggcgaggcctacctggataagcagtccgacacccagtacgtgtgcaagcggaccctggtggatagaggctggggcaatggctgcggcctgtttggcaagggcagcctcgtgacctgcgccaagttcgcctgcagcaagaagatgaccggcaagagcatccagcccgagaacctggaataccggatcatgctgagcgtgcacggctcccagcacagcggcatgatcgtgaacgacaccggccacgagacagacgagaaccgggccaaggtggaaatcacccccaacagccctagagccgaggccacactgggcggctttggatctctgggcctggactgcgagcctagaaccggcctggatttcagcgacctgtactacctgaccatgaacaacaagcactggctggtgcacaaagagtggttccacgacatccccctgccctggcatgctggcgctgatacaggcaccccccactggaacaacaaagaggctctggtggaattcaaggacgcccacgccaagcggcagaccgtggtggtgctgggatctcaggaaggcgccgtgcatacagctctggctggcgccctggaagccgaaatggatggcgccaaaggcagactgtcctccggccacctgaagtgccggctgaagatggacaagctgcggctgaagggcgtgtcctacagcctgtgtaccgccgccttcaccttcaccaagatccccgccgagacactgcacggcaccgtgactgtggaagtgcagtacgccggcaccgacggcccttgtaaagtgcctgctcagatggccgtggatatgcagaccctgacccccgtgggcagactgatcaccgccaaccctgtgatcaccgagagcaccgagaacagcaagatgatgctggaactggacccccccttcggcgactcctacatcgtgatcggcgtgggagagaagaagatcacccaccactggcacagatccggcagcaccatcggcaaggcctttgaggctacagtgcggggagccaagagaatggccgtgctgggcgataccgcctgggattttggctctgtgggcggagccctgaacagcctgggaaagggcatccaccagatcttcggagccgcctttaagagcctgttcggcggcatgagctggttcagccagatcctgatcggcaccctgctcgtgtggctgggcctgaacaccaagaacggcagcatctccctgacctgcctggctctgggcggcgtgctgatctttctgagcacagccgtgtccgcctgataataggctggagcctcggtggccatgcttcttgccccttgggcctccccccagcccctcctccccttcctgcacccgtacccccgtggtctttgaataaagtctgagtgggcggcaaaaaaaaaaaaaaaaaaaaaaaaaaaaaaaaaaaaaaaaaaaaaaaaaaaaaaaaaaaaaaaaaaaaaaaaaaaaaaaaaaaaaaaaaaaaaaaaaaaatctag

SEQ ID NO: 125 - DNA, 2287 bp, unidentified
  source 1..2287: mol_type = genomic DNA; note = Zika Virus
tcaagcttttggaccctcgtacagaagctaatacgactcactatagggaaataagagagaaaagaagagtaagaagaaatataagagccaccatggaaacccctgcccagctgctgttcctgctgctgctgtggctgcctgataccaccggcgtggaagtgaccagaagaggcagcgcctactacatgtacctggacagaagcgacgccggcgaggccatcagctttccaaccaccctgggcatgaacaagtgctacatccagatcatggacctgggccacatgtgcgacgccaccatgagctacgagtgccccatgctggacgagggcgtggaacccgacgatgtggactgctggtgcaacaccaccagcacctgggtggtgtacggcacctgtcaccacaagaagggcgaagccagacggtccagacgggccgtgacactgcctagccactccaccagaaagctgcagacccggtcccagacctggctggaaagcagagagtacaccaagcacctgatccgggtggaaaactggatcttccggaaccccggctttgccctggccgctgctgctattgcttggctgctgggcagcagcacctcccagaaagtgatctacctcgtgatgatcctgctgatcgcccctgcctacagcatccggtgtatcggcgtgtccaaccgggacttcgtggaaggcatgagcggcggcacatgggtggacgtggtgctggaacatggcggctgcgtgacagtgatggcccaggataagcccgccgtggacatcgagctcgtgaccaccaccgtgtccaatatggccgaagtgcggagctactgctacgaggccagcatcagcgacatggccagcgacagcagatgccctacacagggcgaggcctacctggataagcagtccgacacccagtacgtgtgcaagcggaccctggtggatagaggctggggcaatggctgcggcctgtttggcaagggcagcctcgtgacctgcgccaagttcgcctgcagcaagaagatgaccggcaagagcatccagcccgagaacctggaataccggatcatgctgagcgtgcacggcagccagcactccggcatgatcgtgaacgacaccggccacgagacagacgagaaccgggccaaggtggaaatcacccccaacagccctagagccgaggccacactgggcggctttggatctctgggcctggactgcgagcctagaaccggcctggatttcagcgacctgtactacctgaccatgaacaacaagcactggctggtgcacaaagagtggttccacgacatccccctgccctggcatgccggcgctgatacaggcacaccccactggaacaacaaagaggctctggtggaattcaaggacgcccacgccaagcggcagaccgtggtggtgctgggatctcaggaaggcgccgtgcatacagctctggctggcgccctggaagccgaaatggatggcgccaaaggcagactgtccagcggccacctgaagtgccggctgaagatggacaagctgcggctgaagggcgtgtcctacagcctgtgtaccgccgccttcaccttcaccaagatccccgccgagacactgcacggcaccgtgactgtggaagtgcagtacgccggcaccgacggcccttgtaaagtgcctgctcagatggccgtggatatgcagaccctgacccccgtgggcagactgatcaccgccaaccctgtgatcaccgagagcaccgagaacagcaagatgatgctggaactggacccccccttcggcgactcctacatcgtgatcggcgtgggagagaagaagatcacccaccactggcaccgcagcggcagcacaatcggcaaggcctttgaagccacagtgcggggagccaagagaatggccgtgctgggagataccgcctgggactttggctctgtgggcggagccctgaactctctgggcaagggaatccaccagatcttcggagccgcctttaagagcctgttcggcggcatgagctggttcagccagatcctgatcggcaccctgctcgtgtggctgggcctgaacaccaagaacggcagcatctccctgacctgcctggctctgggaggcgtgctgatctttctgagcaccgccgtgtctgcctgataataggctggagcctcggtggccatgcttcttgccccttgggcctccccccagcccctcctccccttcctgcacccgtacccccgtggtctttgaataaagtctgagtgggcggc

SEQ ID NO: 126 - DNA, 2076 bp, unidentified
  source 1..2076: mol_type = genomic DNA; note = Zika Virus
atggaaacccctgcccagctgctgttcctgctgctgctgtggctgcctgataccaccggcgtggaagtgaccagaagaggcagcgcctactacatgtacctggacagaagcgacgccggcgaggccatcagctttccaaccaccctgggcatgaacaagtgctacatccagatcatggacctgggccacatgtgcgacgccaccatgagctacgagtgccccatgctggacgagggcgtggaacccgacgatgtggactgctggtgcaacaccaccagcacctgggtggtgtacggcacctgtcaccacaagaagggcgaagccagacggtccagacgggccgtgacactgcctagccactccaccagaaagctgcagacccggtcccagacctggctggaaagcagagagtacaccaagcacctgatccgggtggaaaactggatcttccggaaccccggctttgccctggccgctgctgctattgcttggctgctgggcagcagcacctcccagaaagtgatctacctcgtgatgatcctgctgatcgcccctgcctacagcatccggtgtatcggcgtgtccaaccgggacttcgtggaaggcatgagcggcggcacatgggtggacgtggtgctggaacatggcggctgcgtgacagtgatggcccaggataagcccgccgtggacatcgagctcgtgaccaccaccgtgtccaatatggccgaagtgcggagctactgctacgaggccagcatcagcgacatggccagcgacagcagatgccctacacagggcgaggcctacctggataagcagtccgacacccagtacgtgtgcaagcggaccctggtggatagaggctggggcaatggctgcggcctgtttggcaagggcagcctcgtgacctgcgccaagttcgcctgcagcaagaagatgaccggcaagagcatccagcccgagaacctggaataccggatcatgctgagcgtgcacggcagccagcactccggcatgatcgtgaacgacaccggccacgagacagacgagaaccgggccaaggtggaaatcacccccaacagccctagagccgaggccacactgggcggctttggatctctgggcctggactgcgagcctagaaccggcctggatttcagcgacctgtactacctgaccatgaacaacaagcactggctggtgcacaaagagtggttccacgacatccccctgccctggcatgccggcgctgatacaggcacaccccactggaacaacaaagaggctctggtggaattcaaggacgcccacgccaagcggcagaccgtggtggtgctgggatctcaggaaggcgccgtgcatacagctctggctggcgccctggaagccgaaatggatggcgccaaaggcagactgtccagcggccacctgaagtgccggctgaagatggacaagctgcggctgaagggcgtgtcctacagcctgtgtaccgccgccttcaccttcaccaagatccccgccgagacactgcacggcaccgtgactgtggaagtgcagtacgccggcaccgacggcccttgtaaagtgcctgctcagatggccgtggatatgcagaccctgacccccgtgggcagactgatcaccgccaaccctgtgatcaccgagagcaccgagaacagcaagatgatgctggaactggacccccccttcggcgactcctacatcgtgatcggcgtgggagagaagaagatcacccaccactggcaccgcagcggcagcacaatcggcaaggcctttgaagccacagtgcggggagccaagagaatggccgtgctgggagataccgcctgggactttggctctgtgggcggagccctgaactctctgggcaagggaatccaccagatcttcggagccgcctttaagagcctgttcggcggcatgagctggttcagccagatcctgatcggcaccctgctcgtgtggctgggcctgaacaccaagaacggcagcatctccctgacctgcctggctctgggaggcgtgctgatctttctgagcaccgccgtgtctgcc

SEQ ID NO: 127 - DNA, 2348 bp, unidentified
  source 1..2348: mol_type = genomic DNA; note = Zika Virus
ggggaaataagagagaaaagaagagtaagaagaaatataagagccaccatggaaacccctgcccagctgctgttcctgctgctgctgtggctgcctgataccaccggcgtggaagtgaccagaagaggcagcgcctactacatgtacctggacagaagcgacgccggcgaggccatcagctttccaaccaccctgggcatgaacaagtgctacatccagatcatggacctgggccacatgtgcgacgccaccatgagctacgagtgccccatgctggacgagggcgtggaacccgacgatgtggactgctggtgcaacaccaccagcacctgggtggtgtacggcacctgtcaccacaagaagggcgaagccagacggtccagacgggccgtgacactgcctagccactccaccagaaagctgcagacccggtcccagacctggctggaaagcagagagtacaccaagcacctgatccgggtggaaaactggatcttccggaaccccggctttgccctggccgctgctgctattgcttggctgctgggcagcagcacctcccagaaagtgatctacctcgtgatgatcctgctgatcgcccctgcctacagcatccggtgtatcggcgtgtccaaccgggacttcgtggaaggcatgagcggcggcacatgggtggacgtggtgctggaacatggcggctgcgtgacagtgatggcccaggataagcccgccgtggacatcgagctcgtgaccaccaccgtgtccaatatggccgaagtgcggagctactgctacgaggccagcatcagcgacatggccagcgacagcagatgccctacacagggcgaggcctacctggataagcagtccgacacccagtacgtgtgcaagcggaccctggtggatagaggctggggcaatggctgcggcctgtttggcaagggcagcctcgtgacctgcgccaagttcgcctgcagcaagaagatgaccggcaagagcatccagcccgagaacctggaataccggatcatgctgagcgtgcacggcagccagcactccggcatgatcgtgaacgacaccggccacgagacagacgagaaccgggccaaggtggaaatcacccccaacagccctagagccgaggccacactgggcggctttggatctctgggcctggactgcgagcctagaaccggcctggatttcagcgacctgtactacctgaccatgaacaacaagcactggctggtgcacaaagagtggttccacgacatccccctgccctggcatgccggcgctgatacaggcacaccccactggaacaacaaagaggctctggtggaattcaaggacgcccacgccaagcggcagaccgtggtggtgctgggatctcaggaaggcgccgtgcatacagctctggctggcgccctggaagccgaaatggatggcgccaaaggcagactgtccagcggccacctgaagtgccggctgaagatggacaagctgcggctgaagggcgtgtcctacagcctgtgtaccgccgccttcaccttcaccaagatccccgccgagacactgcacggcaccgtgactgtggaagtgcagtacgccggcaccgacggcccttgtaaagtgcctgctcagatggccgtggatatgcagaccctgacccccgtgggcagactgatcaccgccaaccctgtgatcaccgagagcaccgagaacagcaagatgatgctggaactggacccccccttcggcgactcctacatcgtgatcggcgtgggagagaagaagatcacccaccactggcaccgcagcggcagcacaatcggcaaggcctttgaagccacagtgcggggagccaagagaatggccgtgctgggagataccgcctgggactttggctctgtgggcggagccctgaactctctgggcaagggaatccaccagatcttcggagccgcctttaagagcctgttcggcggcatgagctggttcagccagatcctgatcggcaccctgctcgtgtggctgggcctgaacaccaagaacggcagcatctccctgacctgcctggctctgggaggcgtgctgatctttctgagcaccgccgtgtctgcctgataataggctggagcctcggtggccatgcttcttgccccttgggcctccccccagcccctcctccccttcctgcacccgtacccccgtggtctttgaataaagtctgagtgggcggcaaaaaaaaaaaaaaaaaaaaaaaaaaaaaaaaaaaaaaaaaaaaaaaaaaaaaaaaaaaaaaaaaaaaaaaaaaaaaaaaaaaaaaaaaaaaaaaaaaaatctag

SEQ ID NO: 128 - DNA, 2278 bp, unidentified
  source 1..2278: mol_type = genomic DNA; note = Zika Virus
tcaagcttttggaccctcgtacagaagctaatacgactcactatagggaaataagagagaaaagaagagtaagaagaaatataagagccaccatggaaacccctgcccagctgctgttcctgctgctgctgtggctgcctgataccaccggcaccagaagaggcagcgcctactacatgtacctggacagaagcgacgccggcgaggccatcagctttccaaccaccctgggcatgaacaagtgctacatccagatcatggacctgggccacatgtgcgacgccaccatgagctacgagtgccccatgctggacgagggcgtggaacccgacgatgtggactgctggtgcaacaccaccagcacctgggtggtgtacggcacctgtcaccacaagaagggcgaagccagacggtccagacgggccgtgacactgcctagccactccaccagaaagctgcagacccggtcccagacctggctggaaagcagagagtacaccaagcacctgatccgggtggaaaactggatcttccggaaccccggctttgccctggccgctgctgctattgcttggctgctgggcagcagcacctcccagaaagtgatctacctcgtgatgatcctgctgatcgcccctgcctacagcatccggtgtatcggcgtgtccaaccgggacttcgtggaaggcatgagcggcggcacatgggtggacgtggtgctggaacatggcggctgcgtgacagtgatggcccaggataagcccgccgtggacatcgagctcgtgaccaccaccgtgtccaatatggccgaagtgcggagctactgctacgaggccagcatcagcgacatggccagcgacagcagatgccctacacagggcgaggcctacctggataagcagtccgacacccagtacgtgtgcaagcggaccctggtggatagaggctggggcaatggctgcggcctgtttggcaagggcagcctcgtgacctgcgccaagttcgcctgcagcaagaagatgaccggcaagagcatccagcccgagaacctggaataccggatcatgctgagcgtgcacggcagccagcactccggcatgatcgtgaacgacaccggccacgagacagacgagaaccgggccaaggtggaaatcacccccaacagccctagagccgaggccacactgggcggctttggatctctgggcctggactgcgagcctagaaccggcctggatttcagcgacctgtactacctgaccatgaacaacaagcactggctggtgcacaaagagtggttccacgacatccccctgccctggcatgccggcgctgatacaggcacaccccactggaacaacaaagaggctctggtggaattcaaggacgcccacgccaagcggcagaccgtggtggtgctgggatctcaggaaggcgccgtgcatacagctctggctggcgccctggaagccgaaatggatggcgccaaaggcagactgtccagcggccacctgaagtgccggctgaagatggacaagctgcggctgaagggcgtgtcctacagcctgtgtaccgccgccttcaccttcaccaagatccccgccgagacactgcacggcaccgtgactgtggaagtgcagtacgccggcaccgacggcccttgtaaagtgcctgctcagatggccgtggatatgcagaccctgacccccgtgggcagactgatcaccgccaaccctgtgatcaccgagagcaccgagaacagcaagatgatgctggaactggacccccccttcggcgactcctacatcgtgatcggcgtgggagagaagaagatcacccaccactggcaccgcagcggcagcacaatcggcaaggcctttgaagccacagtgcggggagccaagagaatggccgtgctgggagataccgcctgggactttggctctgtgggcggagccctgaactctctgggcaagggaatccaccagatcttcggagccgcctttaagagcctgttcggcggcatgagctggttcagccagatcctgatcggcaccctgctcgtgtggctgggcctgaacaccaagaacggcagcatctccctgacctgcctggctctgggaggcgtgctgatctttctgagcaccgccgtgtctgcctgataataggctggagcctcggtggccatgcttcttgccccttgggcctccccccagcccctcctccccttcctgcacccgtacccccgtggtctttgaataaagtctgagtgggcggc

SEQ ID NO: 129 - DNA, 2067 bp, unidentified
  source 1..2067: mol_type = genomic DNA; note = Zika Virus
atggaaacccctgcccagctgctgttcctgctgctgctgtggctgcctgataccaccggcaccagaagaggcagcgcctactacatgtacctggacagaagcgacgccggcgaggccatcagctttccaaccaccctgggcatgaacaagtgctacatccagatcatggacctgggccacatgtgcgacgccaccatgagctacgagtgccccatgctggacgagggcgtggaacccgacgatgtggactgctggtgcaacaccaccagcacctgggtggtgtacggcacctgtcaccacaagaagggcgaagccagacggtccagacgggccgtgacactgcctagccactccaccagaaagctgcagacccggtcccagacctggctggaaagcagagagtacaccaagcacctgatccgggtggaaaactggatcttccggaaccccggctttgccctggccgctgctgctattgcttggctgctgggcagcagcacctcccagaaagtgatctacctcgtgatgatcctgctgatcgcccctgcctacagcatccggtgtatcggcgtgtccaaccgggacttcgtggaaggcatgagcggcggcacatgggtggacgtggtgctggaacatggcggctgcgtgacagtgatggcccaggataagcccgccgtggacatcgagctcgtgaccaccaccgtgtccaatatggccgaagtgcggagctactgctacgaggccagcatcagcgacatggccagcgacagcagatgccctacacagggcgaggcctacctggataagcagtccgacacccagtacgtgtgcaagcggaccctggtggatagaggctggggcaatggctgcggcctgtttggcaagggcagcctcgtgacctgcgccaagttcgcctgcagcaagaagatgaccggcaagagcatccagcccgagaacctggaataccggatcatgctgagcgtgcacggcagccagcactccggcatgatcgtgaacgacaccggccacgagacagacgagaaccgggccaaggtggaaatcacccccaacagccctagagccgaggccacactgggcggctttggatctctgggcctggactgcgagcctagaaccggcctggatttcagcgacctgtactacctgaccatgaacaacaagcactggctggtgcacaaagagtggttccacgacatccccctgccctggcatgccggcgctgatacaggcacaccccactggaacaacaaagaggctctggtggaattcaaggacgcccacgccaagcggcagaccgtggtggtgctgggatctcaggaaggcgccgtgcatacagctctggctggcgccctggaagccgaaatggatggcgccaaaggcagactgtccagcggccacctgaagtgccggctgaagatggacaagctgcggctgaagggcgtgtcctacagcctgtgtaccgccgccttcaccttcaccaagatccccgccgagacactgcacggcaccgtgactgtggaagtgcagtacgccggcaccgacggcccttgtaaagtgcctgctcagatggccgtggatatgcagaccctgacccccgtgggcagactgatcaccgccaaccctgtgatcaccgagagcaccgagaacagcaagatgatgctggaactggacccccccttcggcgactcctacatcgtgatcggcgtgggagagaagaagatcacccaccactggcaccgcagcggcagcacaatcggcaaggcctttgaagccacagtgcggggagccaagagaatggccgtgctgggagataccgcctgggactttggctctgtgggcggagccctgaactctctgggcaagggaatccaccagatcttcggagccgcctttaagagcctgttcggcggcatgagctggttcagccagatcctgatcggcaccctgctcgtgtggctgggcctgaacaccaagaacggcagcatctccctgacctgcctggctctgggaggcgtgctgatctttctgagcaccgccgtgtctgcc

SEQ ID NO: 130 - DNA, 2339 bp, unidentified
  source 1..2339: mol_type = genomic DNA; note = Zika Virus
ggggaaataagagagaaaagaagagtaagaagaaatataagagccaccatggaaacccctgcccagctgctgttcctgctgctgctgtggctgcctgataccaccggcaccagaagaggcagcgcctactacatgtacctggacagaagcgacgccggcgaggccatcagctttccaaccaccctgggcatgaacaagtgctacatccagatcatggacctgggccacatgtgcgacgccaccatgagctacgagtgccccatgctggacgagggcgtggaacccgacgatgtggactgctggtgcaacaccaccagcacctgggtggtgtacggcacctgtcaccacaagaagggcgaagccagacggtccagacgggccgtgacactgcctagccactccaccagaaagctgcagacccggtcccagacctggctggaaagcagagagtacaccaagcacctgatccgggtggaaaactggatcttccggaaccccggctttgccctggccgctgctgctattgcttggctgctgggcagcagcacctcccagaaagtgatctacctcgtgatgatcctgctgatcgcccctgcctacagcatccggtgtatcggcgtgtccaaccgggacttcgtggaaggcatgagcggcggcacatgggtggacgtggtgctggaacatggcggctgcgtgacagtgatggcccaggataagcccgccgtggacatcgagctcgtgaccaccaccgtgtccaatatggccgaagtgcggagctactgctacgaggccagcatcagcgacatggccagcgacagcagatgccctacacagggcgaggcctacctggataagcagtccgacacccagtacgtgtgcaagcggaccctggtggatagaggctggggcaatggctgcggcctgtttggcaagggcagcctcgtgacctgcgccaagttcgcctgcagcaagaagatgaccggcaagagcatccagcccgagaacctggaataccggatcatgctgagcgtgcacggcagccagcactccggcatgatcgtgaacgacaccggccacgagacagacgagaaccgggccaaggtggaaatcacccccaacagccctagagccgaggccacactgggcggctttggatctctgggcctggactgcgagcctagaaccggcctggatttcagcgacctgtactacctgaccatgaacaacaagcactggctggtgcacaaagagtggttccacgacatccccctgccctggcatgccggcgctgatacaggcacaccccactggaacaacaaagaggctctggtggaattcaaggacgcccacgccaagcggcagaccgtggtggtgctgggatctcaggaaggcgccgtgcatacagctctggctggcgccctggaagccgaaatggatggcgccaaaggcagactgtccagcggccacctgaagtgccggctgaagatggacaagctgcggctgaagggcgtgtcctacagcctgtgtaccgccgccttcaccttcaccaagatccccgccgagacactgcacggcaccgtgactgtggaagtgcagtacgccggcaccgacggcccttgtaaagtgcctgctcagatggccgtggatatgcagaccctgacccccgtgggcagactgatcaccgccaaccctgtgatcaccgagagcaccgagaacagcaagatgatgctggaactggacccccccttcggcgactcctacatcgtgatcggcgtgggagagaagaagatcacccaccactggcaccgcagcggcagcacaatcggcaaggcctttgaagccacagtgcggggagccaagagaatggccgtgctgggagataccgcctgggactttggctctgtgggcggagccctgaactctctgggcaagggaatccaccagatcttcggagccgcctttaagagcctgttcggcggcatgagctggttcagccagatcctgatcggcaccctgctcgtgtggctgggcctgaacaccaagaacggcagcatctccctgacctgcctggctctgggaggcgtgctgatctttctgagcaccgccgtgtctgcctgataataggctggagcctcggtggccatgcttcttgccccttgggcctccccccagcccctcctccccttcctgcacccgtacccccgtggtctttgaataaagtctgagtgggcggcaaaaaaaaaaaaaaaaaaaaaaaaaaaaaaaaaaaaaaaaaaaaaaaaaaaaaaaaaaaaaaaaaaaaaaaaaaaaaaaaaaaaaaaaaaaaaaaaaaaatctag

SEQ ID NO: 131 - DNA, 1783 bp, unidentified
  source 1..1783: mol_type = genomic DNA; note = Zika Virus
tcaagcttttggaccctcgtacagaagctaatacgactcactatagggaaataagagagaaaagaagagtaagaagaaatataagagccaccatggaaacccctgcccagctgctgttcctgctgctgctgtggctgcctgacaccaccggcatcagatgcatcggcgtgtccaaccgggacttcgtggaaggcatgagcggcggcacatgggtggacgtggtgctggaacatggcggctgcgtgacagtgatggcccaggataagcccgccgtggacatcgagctcgtgaccaccaccgtgtccaatatggccgaagtgcggagctactgctacgaggccagcatcagcgacatggccagcgacagcagatgccctacacagggcgaggcctacctggacaagcagagcgacacccagtacgtgtgcaagcggaccctggtggatagaggctggggcaatggctgcggcctgtttggcaagggcagcctcgtgacctgcgccaagttcgcctgcagcaagaagatgaccggcaagagcatccagcccgagaacctggaataccggatcatgctgagcgtgcacggcagccagcactccggcatgatcgtgaacgacaccggccacgagacagacgagaaccgggccaaggtggaaatcacccccaacagccctagagccgaggccacactgggcggctttggatctctgggcctggactgcgagcctagaaccggcctggatttcagcgacctgtactacctgaccatgaacaacaagcactggctggtgcacaaagagtggttccacgacatccccctgccctggcatgccggcgctgatacaggcacaccccactggaacaacaaagaggctctggtggaattcaaggacgcccacgccaagcggcagaccgtggtggtgctgggatctcaggaaggcgccgtgcatacagctctggctggcgccctggaagccgaaatggatggcgccaaaggcagactgagcagcggccacctgaagtgccggctgaagatggacaagctgcggctgaagggcgtgtcctacagcctgtgtaccgccgccttcaccttcaccaagatccccgccgagacactgcacggcaccgtgactgtggaagtgcagtacgccggcaccgacggcccttgtaaagtgcctgctcagatggccgtggatatgcagaccctgacccccgtgggcaggctgatcacagccaaccctgtgatcaccgagagcaccgagaacagcaagatgatgctggaactggacccccccttcggcgactcctacatcgtgatcggcgtgggagagaagaagatcacccaccactggcacagaagcggcagcaccatcggcaaggcctttgaggctacagtgcggggagccaagagaatggccgtgctgggagataccgcctgggactttggctctgtgggcggagccctgaactctctgggcaagggaatccaccagatcttcggcgctgccttcaagagcctgttcggcggcatgagctggttcagccagatcctgatcggcaccctgctcgtgtggctgggcctgaacaccaagaacggcagcatctccctgacctgcctggctctgggaggcgtgctgatctttctgagcaccgccgtgtctgcctgataataggctggagcctcggtggccatgcttcttgccccttgggcctccccccagcccctcctccccttcctgcacccgtacccccgtggtctttgaataaagtctgagtgggcggc

SEQ ID NO: 132 - DNA, 1572 bp, unidentified
  source 1..1572: mol_type = genomic DNA; note = Zika Virus
atggaaacccctgcccagctgctgttcctgctgctgctgtggctgcctgacaccaccggcatcagatgcatcggcgtgtccaaccgggacttcgtggaaggcatgagcggcggcacatgggtggacgtggtgctggaacatggcggctgcgtgacagtgatggcccaggataagcccgccgtggacatcgagctcgtgaccaccaccgtgtccaatatggccgaagtgcggagctactgctacgaggccagcatcagcgacatggccagcgacagcagatgccctacacagggcgaggcctacctggacaagcagagcgacacccagtacgtgtgcaagcggaccctggtggatagaggctggggcaatggctgcggcctgtttggcaagggcagcctcgtgacctgcgccaagttcgcctgcagcaagaagatgaccggcaagagcatccagcccgagaacctggaataccggatcatgctgagcgtgcacggcagccagcactccggcatgatcgtgaacgacaccggccacgagacagacgagaaccgggccaaggtggaaatcacccccaacagccctagagccgaggccacactgggcggctttggatctctgggcctggactgcgagcctagaaccggcctggatttcagcgacctgtactacctgaccatgaacaacaagcactggctggtgcacaaagagtggttccacgacatccccctgccctggcatgccggcgctgatacaggcacaccccactggaacaacaaagaggctctggtggaattcaaggacgcccacgccaagcggcagaccgtggtggtgctgggatctcaggaaggcgccgtgcatacagctctggctggcgccctggaagccgaaatggatggcgccaaaggcagactgagcagcggccacctgaagtgccggctgaagatggacaagctgcggctgaagggcgtgtcctacagcctgtgtaccgccgccttcaccttcaccaagatccccgccgagacactgcacggcaccgtgactgtggaagtgcagtacgccggcaccgacggcccttgtaaagtgcctgctcagatggccgtggatatgcagaccctgacccccgtgggcaggctgatcacagccaaccctgtgatcaccgagagcaccgagaacagcaagatgatgctggaactggacccccccttcggcgactcctacatcgtgatcggcgtgggagagaagaagatcacccaccactggcacagaagcggcagcaccatcggcaaggcctttgaggctacagtgcggggagccaagagaatggccgtgctgggagataccgcctgggactttggctctgtgggcggagccctgaactctctgggcaagggaatccaccagatcttcggcgctgccttcaagagcctgttcggcggcatgagctggttcagccagatcctgatcggcaccctgctcgtgtggctgggcctgaacaccaagaacggcagcatctccctgacctgcctggctctgggaggcgtgctgatctttctgagcaccgccgtgtctgcc

SEQ ID NO: 133 - DNA, 1844 bp, unidentified
  source 1..1844: mol_type = genomic DNA; note = Zika Virus
ggggaaataagagagaaaagaagagtaagaagaaatataagagccaccatggaaacccctgcccagctgctgttcctgctgctgctgtggctgcctgacaccaccggcatcagatgcatcggcgtgtccaaccgggacttcgtggaaggcatgagcggcggcacatgggtggacgtggtgctggaacatggcggctgcgtgacagtgatggcccaggataagcccgccgtggacatcgagctcgtgaccaccaccgtgtccaatatggccgaagtgcggagctactgctacgaggccagcatcagcgacatggccagcgacagcagatgccctacacagggcgaggcctacctggacaagcagagcgacacccagtacgtgtgcaagcggaccctggtggatagaggctggggcaatggctgcggcctgtttggcaagggcagcctcgtgacctgcgccaagttcgcctgcagcaagaagatgaccggcaagagcatccagcccgagaacctggaataccggatcatgctgagcgtgcacggcagccagcactccggcatgatcgtgaacgacaccggccacgagacagacgagaaccgggccaaggtggaaatcacccccaacagccctagagccgaggccacactgggcggctttggatctctgggcctggactgcgagcctagaaccggcctggatttcagcgacctgtactacctgaccatgaacaacaagcactggctggtgcacaaagagtggttccacgacatccccctgccctggcatgccggcgctgatacaggcacaccccactggaacaacaaagaggctctggtggaattcaaggacgcccacgccaagcggcagaccgtggtggtgctgggatctcaggaaggcgccgtgcatacagctctggctggcgccctggaagccgaaatggatggcgccaaaggcagactgagcagcggccacctgaagtgccggctgaagatggacaagctgcggctgaagggcgtgtcctacagcctgtgtaccgccgccttcaccttcaccaagatccccgccgagacactgcacggcaccgtgactgtggaagtgcagtacgccggcaccgacggcccttgtaaagtgcctgctcagatggccgtggatatgcagaccctgacccccgtgggcaggctgatcacagccaaccctgtgatcaccgagagcaccgagaacagcaagatgatgctggaactggacccccccttcggcgactcctacatcgtgatcggcgtgggagagaagaagatcacccaccactggcacagaagcggcagcaccatcggcaaggcctttgaggctacagtgcggggagccaagagaatggccgtgctgggagataccgcctgggactttggctctgtgggcggagccctgaactctctgggcaagggaatccaccagatcttcggcgctgccttcaagagcctgttcggcggcatgagctggttcagccagatcctgatcggcaccctgctcgtgtggctgggcctgaacaccaagaacggcagcatctccctgacctgcctggctctgggaggcgtgctgatctttctgagcaccgccgtgtctgcctgataataggctggagcctcggtggccatgcttcttgccccttgggcctccccccagcccctcctccccttcctgcacccgtacccccgtggtctttgaataaagtctgagtgggcggcaaaaaaaaaaaaaaaaaaaaaaaaaaaaaaaaaaaaaaaaaaaaaaaaaaaaaaaaaaaaaaaaaaaaaaaaaaaaaaaaaaaaaaaaaaaaaaaaaaaatctag

SEQ ID NO: 134 - DNA, 2088 bp, synthetic construct
  misc_feature 1..2088: note = Synthetic Polynucleotide
  source 1..2088: mol_type = other DNA
atgctgggcagcaacagcggccagagagtggtgttcaccatcctgctgctgctggtggcccctgcctacagcgccgaagtgacaagaagaggcagcgcctactacatgtacctggaccggaacgatgccggcgaggccatcagctttccaaccaccctgggcatgaacaagtgctacatccagatcatggacctgggccacatgtgcgacgccaccatgagctacgagtgccccatgctggacgagggcgtggaacccgacgatgtggactgctggtgcaataccaccagcacctgggtggtgtacggcacctgtcaccacaagaagggcgaagccagacggtccagacgggccgtgacactgcctagccacagcaccagaaagctgcagacccggtcccagacctggctggaaagcagagagtacaccaagcacctgatccgggtggaaaactggatcttccggaaccccggctttgccctggctgccgctgctattgcttggctgctgggctctagcaccagccagaaagtgatctacctcgtgatgatcctgctgatcgccccagcctactccatccggtgtatcggcgtgtccaaccgggacttcgtggaaggcatgagcggcggcacatgggtggacgtggtgctggaacatggcggctgcgtgacagtgatggcccaggacaagcccaccgtggacatcgagctcgtgaccaccaccgtgtccaatatggccgaagtgcggagctactgctacgaggccagcatcagcgacatggccagcgacagcagatgccctacacagggcgaggcctacctggacaagcagtccgacacccagtacgtgtgcaagcggaccctggtggacaggggctggggcaatggctgtggcctgtttggcaagggcagcctcgtgacctgcgccaagttcgcctgcagcaagaagatgaccggcaagagcatccagcccgagaacctggaataccggatcatgctgagcgtgcacggctcccagcacagcggcatgatcgtgaacgacaccggccacgagacagacgagaaccgggccaaggtggaaatcacccccaacagccctagagccgaggccacactgggcggctttggatctctgggcctggactgcgagcctagaaccggcctggatttcagcgacctgtactacctgaccatgaacaacaaacactggctggtgcacaaagagtggttccacgacatccccctgccctggcatgctggcgctgatacaggcaccccccactggaacaacaaagaggccctggtggaattcaaggacgcccacgccaagcggcagaccgtggtggtgctgggatctcaggaaggcgccgtgcatacagctctggctggcgccctggaagccgaaatggatggcgccaaaggcagactgagcagcggccacctgaagtgccggctgaagatggacaagctgcggctgaagggcgtgtcctacagcctgtgtaccgccgccttcaccttcaccaagatccccgccgagacactgcacggcaccgtgactgtggaagtgcagtacgccggcaccgacggcccttgtaaagtgcctgctcagatggccgtggatatgcagaccctgacccccgtgggcaggctgatcacagccaaccctgtgatcaccgagagcaccgagaacagcaagatgatgctggaactggacccccccttcggcgactcctacatcgtgatcggcgtgggagagaagaagatcacccaccactggcacagaagcggcagcaccatcggcaaggcctttgaggctacagtgcggggagccaagagaatggccgtgctgggcgataccgcctgggattttggctctgtgggcggagccctgaacagcctgggaaagggcatccaccagatcttcggagccgcctttaagagcctgttcggcggcatgagctggttcagccagatcctgatcggcaccctgctgatgtggctgggcctgaacaccaagaacggcagcatctccctgatgtgcctggctctgggcggcgtgctgatctttctgagcacagccgtgtccgcc

SEQ ID NO: 135 - DNA, 2064 bp, synthetic construct
  misc_feature 1..2064: note = Synthetic Polynucleotide
  source 1..2064: mol_type = other DNA
atgaagtgcctgctgtacctggccttcctgttcatcggcgtgaactgcgccgaagtgaccagaagaggcagcgcctactacatgtacctggaccggaacgatgccggcgaggccatcagctttccaaccaccctgggcatgaacaagtgctacatccagatcatggacctgggccacatgtgcgacgccaccatgagctacgagtgccccatgctggacgagggcgtggaacccgacgatgtggactgctggtgcaacaccaccagcacctgggtggtgtacggcacctgtcaccacaagaagggcgaagccagacggtccagacgggccgtgacactgcctagccacagcaccagaaagctgcagacccggtcccagacctggctggaaagcagagagtacaccaagcacctgatccgggtggaaaactggatcttccggaaccccggctttgccctggccgctgctgctattgcttggctgctgggcagcagcacctcccagaaagtgatctacctcgtgatgatcctgctgatcgcccctgcctacagcatccggtgtatcggcgtgtccaaccgggacttcgtggaaggcatgagcggcggcacatgggtggacgtggtgctggaacatggcggctgcgtgacagtgatggcccaggacaagcccaccgtggacatcgagctcgtgaccaccaccgtgtccaatatggccgaagtgcggagctactgctacgaggccagcatcagcgacatggccagcgacagcagatgccctacacagggcgaggcctacctggacaagcagtccgacacccagtacgtgtgcaagcggaccctggtggatagaggctggggcaatggctgcggcctgtttggcaagggcagcctcgtgacctgtgccaagttcgcctgcagcaagaagatgaccggcaagagcatccagcccgagaacctggaataccggatcatgctgagcgtgcacggcagccagcactccggcatgatcgtgaacgacaccggccacgagacagacgagaaccgggccaaggtggaaatcacccccaacagccctagagccgaggccacactgggcggctttggatctctgggcctggactgcgagcctagaaccggcctggatttcagcgacctgtactacctgaccatgaacaacaagcactggctggtgcacaaagagtggttccacgacatccccctgccctggcatgccggcgctgatacaggcacaccccactggaacaacaaagaggctctggtggaattcaaggacgcccacgccaagcggcagaccgtggtggtgctgggatctcaggaaggcgccgtgcatacagctctggctggcgccctggaagccgaaatggatggcgccaaaggcagactgtccagcggccacctgaagtgcagactgaagatggacaagctgcggctgaagggcgtgtcctacagcctgtgtaccgccgccttcaccttcaccaagatccccgccgagacactgcacggcaccgtgactgtggaagtgcagtacgccggcaccgacggcccttgtaaagtgccagctcagatggccgtggatatgcagaccctgacccccgtgggcagactgatcaccgccaaccctgtgatcaccgagagcaccgagaacagcaagatgatgctggaactggacccccccttcggcgactcctacatcgtgatcggcgtgggagagaagaagatcacccaccactggcacagaagcggcagcaccatcggcaaggcctttgaggctacagtgcggggagccaagagaatggccgtgctgggagataccgcctgggactttggctctgtgggcggagccctgaactctctgggcaagggaatccaccagatcttcggagccgcctttaagagcctgttcggcggcatgagctggttcagccagatcctgatcggcaccctgctgatgtggctgggcctgaacaccaagaacggcagcatctccctgatgtgcctggctctgggaggcgtgctgatcttcctgagcacagccgtgtctgcc

SEQ ID NO: 136 - DNA, 2070 bp, synthetic construct
  misc_feature 1..2070: note = Synthetic Polynucleotide
  source 1..2070: mol_type = other DNA
atggactggacctggatcctgttcctggtggccgctgccacaagagtgcacagcgtggaagtgaccagacggggcagcgcctactacatgtacctggacagaagcgacgccggcgaggccatcagctttccaaccaccctgggcatgaacaagtgctacatccagatcatggacctgggccacatgtgcgacgccaccatgagctacgagtgccccatgctggacgagggcgtggaacccgacgatgtggactgctggtgcaacaccaccagcacctgggtggtgtacggcacctgtcaccacaagaagggcgaagccagacggtccagacgggccgtgacactgcctagccacagcaccagaaagctgcagacccggtcccagacctggctggaaagcagagagtacaccaagcacctgatccgggtggaaaactggatcttccggaaccccggctttgccctggctgccgctgctattgcttggctgctgggcagcagcacctcccagaaagtgatctacctcgtgatgatcctgctgatcgcccctgcctacagcatccggtgtatcggcgtgtccaaccgggacttcgtggaaggcatgagcggcggcacatgggtggacgtggtgctggaacatggcggctgcgtgacagtgatggcccaggataagcccgccgtggacatcgagctcgtgaccaccaccgtgtccaatatggccgaagtgcggagctactgctacgaggccagcatcagcgacatggccagcgacagcagatgccctacacagggcgaggcctacctggataagcagtccgacacccagtacgtgtgcaagcggaccctggtggatagaggctggggcaatggctgcggcctgtttggcaagggcagcctcgtgacctgcgccaagttcgcctgcagcaagaagatgaccggcaagagcatccagcccgagaacctggaataccggatcatgctgagcgtgcacggctcccagcacagcggcatgatcgtggccgacaccggccacgagacagacgagaaccgggccaaggtggaaatcacccccaacagccctagagccgaggccacactgggcggctttggatctctgggcctggactgcgagcctagaaccggcctggatttcagcgacctgtactacctgaccatgaacaacaagcactggctggtgcacaaagagtggttccacgacatccccctgccctggcatgctggcgctgatacaggcaccccccactggaacaacaaagaggctctggtggaattcaaggacgcccacgccaagcggcagaccgtggtggtgctgggatctcaggaaggcgccgtgcatacagctctggctggcgccctggaagccgaaatggatggcgccaaaggcagactgtcctccggccacctgaagtgccggctgaagatggacaagctgcggctgaagggcgtgtcctacagcctgtgtaccgccgccttcaccttcaccaagatccccgccgagacactgcacggcaccgtgactgtggaagtgcagtacgccggcaccgacggcccttgtaaagtgcctgctcagatggccgtggatatgcagaccctgacccccgtgggcagactgatcaccgccaaccctgtgatcaccgagagcaccgagaacagcaagatgatgctggaactggacccccccttcggcgactcctacatcgtgatcggcgtgggagagaagaagatcacccaccactggcacagatccggcagcaccatcggcaaggcctttgaggctacagtgcggggagccaagagaatggccgtgctgggcgataccgcctgggattttggctctgtgggcggagccctgaacagcctgggaaagggcatccaccagatcttcggcgctgccttcaagagcctgttcggcggcatgagctggttcagccagatcctgatcggcaccctgctcgtgtggctgggcctgaacaccaagaacggcagcatctccctgacctgcctggctctgggcggcgtgctgatctttctgagcacagccgtgtccgcc

SEQ ID NO: 137 - RNA, 10254 nt, unidentified
  source 1..10254: mol_type = genomic RNA; note = Zika Virus
atgaaaaacccaaagaagaaatccggaggattccggattgtcaatatgctaaaacgcggagtagcccgtgtaaaccccttgggaggtttgaagaggctgccagccggacttctgctgggtcatggacccatcagaatggttttggcgatattagcctttttgagattcacagcaatcaagccatcactgggcctcatcaacagatggggtaccgtggggaaaaaagaggctatggaaataataaaaaaatttaagaaagatcttgctgccatgttgagaataatcaatgctaggaaggagaggaagagacgtggcgcagacaccagcatcggaatcgttggcctcctgttgactacagccatggcagcagagatcactagacgtgggagtgcatactacatgtacttggataggagcgatgcagggaaggccatttctttcgctaccacattgggggtgaacaaatgccatgtgcagatcatggacctcgggcacatgtgtgacgccaccatgagctatgaatgccctatgctggacgagggggtggaaccagatgacgtcgattgctggtgcaacacgacatcaacttgggttgtgtacggaacctgtcatcataaaaaaggtgaagcacggcgatctagaagagccgtcacgctcccatctcactccacaaggaaattgcaaacgcggtcgcagacttggctagaatcaagagaatacacaaagcacctgatcaaggttgaaaattggatattcaggaaccctggttttacgctagtggctgtcgccatcgcctggcttttgggaagctcgacgagccaaaaagtcatatacttggtcatgatactgctgattgccccggcatacagtatcaggtgcataggagtcagcaatagagacttcgtggagggcatgtcaggtgggacctgggttgacgttgtcctggaacatggaggctgcgtcaccgtgatggcacaggacaagccaacagttgacatagagctggtcacaacaacggttagtaacatggccgaggtgagatcctattgttacgaggcatcaatatcggacatggcttcggacagtcgctgcccaacacaaggtgaagcctaccttgacaagcaatcagacactcaatatgtttgcaaaagaacattggtggacagaggttggggaaatgggtgtggactctttggcaaagggagtttggtgacatgtgctaagttcacgtgctccaagaagatgactgggaagagcattcagccggagaacctggagtatcggataatgctatcagtgcatggctcccagcacagtgggatgattgttaatgatgaaaacagagcgaaggtcgaggttacgcccaattcaccaagagcagaagcaaccctgggaggctttggaagcttaggacttgattgtgaaccaaggacaggccttgacttttcagatctgtattacctaaccatgaataacaagcattggttggtgcacaaagagtggtttcatgacatcccattgccctggcatgctggggcagacactggaactccacattggaacaacaaggaggcattagtggaattcaaggacgcccacgccaagaggcaaaccgtcgtggttttggggagccaggaaggagccgtccacacggctcttgctggagctctagaggctgagatggatggtgcaaagggaaggctattctctggccacttgaaatgtcgcttaaaaatggacaagcttagattgaagggcgtgtcatattccttgtgcaccgcggcattcacattcaccaaggtcccggctgaaacactacatggaacagtcacagtggaggtgcagtatgcagggacagatggaccctgcaaggtcccagcccagatggcggtggacatgcagaccttgaccccagtcggaaggctgataaccgccaaccccgtgattactgaaagcactgagaattcaaagatgatgttggagctcgacccaccatttggggattcttacattgtcataggagttggggataagaaaatcacccatcactggcataggagtggcagcaccattggaaaagcatttgaagccactgtgagaggcgctaagagaatggcagtcctgggggacacagcttgggactttggatcagtcggaggtgtgtttaactcattgggcaagggcattcatcagatttttggagcagctttcaaatcactgtttggaggaatgtcctggttctcacagatcctcataggcactctgctggtgtggttaggtctgaacacaaagaatgggtctatctccctcacatgcttagccctggggggagtgatgatcttcctctccacggctgtttctgctgacgtggggtgctcggtggacttctcaaaaaaagaaacgagatgtggcacgggggtgttcgtctacaatgacgttgaagcctggagggaccggtacaagtaccatcctgactcccctcgtagactggcagcagccgttaagcaagcttgggaagaggggatttgtgggatctcctctgtttctagaatggaaaacataatgtggaaatcagtggaaggagagctcaatgcaatcctagaggagaatggagtccaactgacagttgttgtgggatctgtaaaaaaccccatgtggagaggcccacaaagattgccagtgcctgtgaatgagctgccccatggctggaaagcctgggggaaatcgtactttgttagggcggcaaagaccaacaacagttttgttgtcgacggtgacacattgaaggaatgtccgctcaagcacagagcatggaacagcttcctcgtggaggatcacgggtttggggtcttccacaccagtgtttggcttaaggttagagaagattactcactggagtgtgacccagccgtcataggaacagctgttaagggaaaggaggccgcgcacagtgatctaggctattggattgaaagtgaaaagaatgacacatggaggctgaagagggctcatttgattgagatgaaaacatgtgagtggccaaagtctcacacactgtggacagatggagtggaagaaagtgatctgatcatacccaagtctttagctggtccactcagccaccacaacaccagagagggttacagaactcaagtgaaagggccatggcatagtgaggagcttgaaatccgatttgaggaatgtccaggtaccaaggttcatgtggaggagacatgcggaacgagaggaccatctctgagatcaaccactgcaagcggaagggtcattgaggaatggtgctgtagggaatgcacaatgcccccactatcgttccgagcaaaagatggctgctggtatggaatggagataaggcctaggaaagaaccagagagcaacttagtgaggtcaatggtgacagcgggatcaaccgatcatatggatcatttttctcttggagtgcttgtgattctactcatggtgcaggaagggttgaagaagagaatgaccacaaagatcatcatgagcacatcaatggcagtgctggtggccatgatcttgggaggattctcaatgagtgacctggctaagcttgtgatcctgatgggggccactttcgcagaaatgaacactggaggagacgtagctcacttggcattagtagcggcatttaaagtcagaccagccttgctggtctcatttatcttcagagccaactggacacctcgtgagagcatgctgctagccttggcttcgtgtcttctgcaaactgcgatctccgctcttgaaggcgacttgatggtcctcgttaatggatttgctttggcctggttggcaatacgtgcaatggccgtgccacgcactgacaacatcgctctagcaattctggctgctctaacaccactagcccgaggcacactgctcgtggcatggagagcgggcctcgccacttgtggagggttcatgctcctctccctgaaagggaaaggtagtgtgaagaagaacctgccattcgtcgcggccttgggattgaccgctgtgagaatagtggaccccattaatgtggtgggactactgttactcacaaggagtgggaagcggagctggccccctagtgaagtgctcactgctgtcggcctgatatgtgcattggccggagggtttgccaaggcagacatagagatggctgggcccatggcggcagtgggcctgctaattgtcagttatgtggtctcgggaaagagtgtagatatgtacattgaaagagcaggtgacatcacatgggagaaagacgcggaagtcactggaaacagtcctcggcttgacgtggcactagatgagagtggtgatttctctctggtggaggaagatggtccacccatgagagagatcatacttaaggtggtcttgatggccatctgtggcatgaacccaatagccataccttttgctgcaggagcgtggtatgtgtatgtgaagactgggaaaaggagtggtgccctctgggacgtgcctgctccgaaagaagtgaaaaaaggagagaccacagatggagtgtacagagtgatgactcgcagactgctgggttcaacacaagttggagtgggagtcatgcaggagggagtcttccacaccatgtggcacgtcacaaaaggggccgcattgaggagcggtgaagggagacttgatccatactggggggatgtcaagcaggacttggtgtcatattgtgggccttggaagctggacgcagcttgggacggagttagtgaggtgcagcttctggccgtaccccctggagagagagccagaaacattcagactctgcctggaatatttaagacaaaggatggggacatcggagcagttgctttggactatcctgcaggaacctcaggatctccgatcctagacaaatgcgggagagtgataggactctatggcaatggggttgtgatcaagaacggaagctatgttagtgctataacccagggaaagagggaggaggagactccggttgagtgttttgaaccctcgatgctgaagaagaagcagctaactgtcctggacctgcatccaggggctgggaaaaccaggagagttcttcctgaaatagtccgtgaagctataaagaagagactccgcacggtgatcttggcaccaaccagggtcgtcgctgctgagatggaggaagccctgagaggacttccggtgcgttacatgacaacagcagtcaaggtcacccattctgggacagaaatcgttgatttgatgtgccatgccaccttcacttcacgcctactacaacccattagagtccctaattacaacctctacatcatggatgaagcccatttcacagacccctcaagcatagctgcaagaggatatatatcaacaagggttgagatgggcgaggcagcagccatctttatgactgccacaccaccaggaacccgcgatgcgtttccagattccaactcaccaatcatggacacagaagtggaagtcccagagagagcctggagctcaggctttgattgggtgacggaccattctgggaaaacagtttggttcgttccaagcgtgaggaatggaaatgaaatcgcagcctgtctgacaaaggctggaaagcgggttatacagcttagtaggaaaacttttgagacagagtttcagaaaacaaaaaatcaagagtgggactttgtcataacaactgacatctcagagatgggtgccaacttcaaggctgaccgggttatagattccaggagatgcctaaagccagttatacttgatggtgagagagtcatcttggctgggcccatgcctgtcacgcatgctagcgctgctcagaggagaggacgtataggcaggaaccccaacaagcctggagatgagtacatgtatggaggtgggtgtgcggagactgatgaagaccatgcacattggcttgaagcaagaatgcttcttgacaacatttacctccaggatggcctcatagcctcgctctatcgacctgaggccgacaaggtagccgccattgagggagagtttaagctgaggacagagcaaaggaagacctttgtggaactcatgaagagaggagatcttcccgtttggttggcctaccaggttgcatctgccggaataacttatacagacagaagatggtgttttgatggcacaaccaacaacaccataatggaagacagtgtaccagcagaggtgtggaccaagtatggagagaagagagtgctcaaaccaagatggatggacgccagggtctgctcagatcatgcggccctgaagtcgttcaaagaattcgccgctgggaaaagaggagcggctttgggagtaatggaggccctgggaacattaccaggacacatgacagagaggtttcaggaagccattgataacctcgctgtgctcatgcgagcagagactggaagcaggccctacaaggcagcggcagcccaattgccggagaccctagagaccatcatgcttttaggcctgctgggaacagtatcgctggggatcttttttgtcttgatgaggaacaagggcatcgggaagatgggctttgaaatggtaacccttggggccagcgcatggctcatgtggctctcagaaatcgaaccagccagaattgcatgtgtccttattgttgtgtttttattactggtggtgctaataccagagccagagaagcaaagatccccccaggacaatcagatggcaatcattattatggtggcagtgggccttttggggttgataactgcaaatgaacttggatggctggagagaacaaaaaatgacatagctcatctgatgggaaagagagaagagggaacaaccgtgggattctcaatggacatcgatctgcgaccagcctccgcatgggctatttatgccgcattgacaaccctcatcaccccagccgtccagcacgcggtaactacctcgtacaacaactactccttaatggcgatggccacacaagctggagtgctgtttggcatgggcaaagggatgccattttatgcatgggacttaggagtcccgttgctaatgatgggctgctactcacaactaacacccctgaccctgatagtagccatcattttgcttgtggcacattacatgtacttgatcccaggcctacaggcagcagcagcacgcgctgcccagaagagaacagcagccggcatcatgaagaatcccgttgtggatggaatagtggtaactgacattgacacaatgacaattgacccccaagtggagaagaagatgggacaagtgctacttatagcagtggctgtctccagtgctgtgttgctgcggaccgcttggggatggggggaggctggagctttgatcacagcagcaacttccaccctgtgggaaggctccccaaacaaatactggaactcctccacagccacctcactgtgcaacatcttcagaggaagttacttggcaggagcttcccttatttacacagtgacaagaaatgccggcctggttaagagacgtggaggtggaacgggagaaactctgggagagaagtggaaagcccgcctgaatcagatgtcggccttggagttctactcttacaaaaagtcaggcatcactgaagtatgtagagaggaggctcgccgcgccctcaaggatggagtggccacaggaggacatgctgtatcccgaggaagcgcaaaactcagatggttggtggagagaggatatctgcagccctatggaaaggttgttgatctcggatgcggcagagggggctggagttattatgccgccaccatccgcaaagtgcaggaggtgagaggatacacaaagggaggtcccggtcatgaagagcccatgctggtgcaaagctatgggtggaacataattcgtctcaagagtggagtggacgtcttccacatggcggctgagtcgtgtgacactttgctgtgtgacataggtgagtcatcatccagtcctgaagtggaggagacgcgaacactcagagtgctctccatggtgggggactggcttgagaagagaccaggggccttctgcataaaggtgttatgcccatacaccagcaccatgatggagaccatggagcgactgcaacgtaggtatgggggaggactagtcagagtgccactgtcccgcaattctacacatgagatgtattgggtctctggagcaaaaagtaacatcataaaaagtgtgtccaccacaagtcagctcctcctgggacgcatggatgggcccaggaggccagtgaagtatgaggaggatgtgaacctcggctcaggcacacgagctgtggcaagctgtgctgaggctcccaacatgaaggtcattggtaggcgcattgagagaatccgtagtgaacatgcagaaacatggttctttgatgaaaaccatccatacaggacatgggcctaccacgggagctacgaagcccccacgcaagggtcagcatcttccctcgtgaatggggttgttagactcctgtcaaagccctgggatgtggtgactggagttacaggaatagctatgactgacaccacaccgtacggccaacaaagagtcttcaaagaaaaagtggacaccagggtgccagaccctcaagaaggtactcgccaggtaatgaacatggtcgcttcctggctgtggaaggagctgggaaaacgtaagcggccacgtgtctgcaccaaagaagagttcatcaacaaggtgcgcagcaatgcagcactgggagcaatatttgaagaggaaaaagaatggaagacggctgtggaagctgtgaatgatccaaggttttgggccctagtggataaggaaagagaacaccacctgagaggagagtgccatagttgtgtgtacaacatgatgggaaaaagagaaaagaagcaaggggaattcgggaaagcaaaaggcagtcgcgccatctggtacatgtggttgggagccagattcttggagtttgaagcccttggattcttgaacgaggaccattggatgggaagagaaaactcaggaggtggtgtcgaagggttgggactgcaaagacttggatacgttctagaagaaatgagccgggcaccaggaggaaagatgtatgcagatgacaccgctggctgggacacccgcattagcaagtttgatttggagaatgaagccttgattactaaccaaatggatgaagggcacagaactctggcgttggccgtgattaagtacacataccaaaacaaagtggtgaaggtcctcagaccagctgaaggaggaaaaacagtcatggacatcatttcaagacaagaccagagggggagcggacaagttgtcacttatgctctcaacacatttaccaacttggtggtgcagctcatccggaacatggaggctgaggaagtgttagagatgcaagacttatggctgttgaggaagccagagaaagtaaccagatggctgcagagtagcggatgggacagactcaaacgaatggcagtcagtggtgatgactgtgttgtaaagccaattgatgacaggtttgcacacgccctcaggttcttgaatgatatggggaaagttaggaaagacacacaggaatggaaaccctcaactggatggagcaactgggaagaagtcccgttctgctcccaccactttaacaagctgcacctcaaagacgggagatccattgtggtcccttgccgccaccaagatgaactgattggccgggctcgcgtttcgccgggggcaggatggagcatccgggagactgcctgtcttgcaaaatcatatgcacagatgtggcagcttctttatttccacagaagagacctccgactgatggccaatgccatttgctcggccgtgccagttgactgggtcccaactgggagaactacctggtcaatccatggaaagggagaatggatgactactgaggacatgctcatggtgtggaatagagtgtggattgaggagaatgatcacatggaggacaagacccctgtaacaaaatggacagacattccctatttgggaaaaagggaggacttatggtgtggatcccttataggacacagacctcgcaccacttgggctgagaacatcaaagacacagtcagcatggtgcgcagaatcataggtgatgaagaaaagtacatggactacctatccactcaagttcgctacttgggtgaggaagggtctacacctggagtgctgtaa

SEQ ID NO: 138 - RNA, 2281 nt, unidentified
  source 1..2281: mol_type = genomic RNA; note = Zika Virus
tcaagcttttggaccctcgtacagaagctaatacgactcactatagggaaataagagagaaaagaagagtaagaagaaatataagagccaccatggactggacctggatcctgttcctggtggccgctgccacaagagtgcacagcgtggaagtgaccagacggggcagcgcctactacatgtacctggacagaagcgacgccggcgaggccatcagctttccaaccaccctgggcatgaacaagtgctacatccagatcatggacctgggccacatgtgcgacgccaccatgagctacgagtgccccatgctggacgagggcgtggaacccgacgatgtggactgctggtgcaacaccaccagcacctgggtggtgtacggcacctgtcaccacaagaagggcgaagccagacggtccagacgggccgtgacactgcctagccacagcaccagaaagctgcagacccggtcccagacctggctggaaagcagagagtacaccaagcacctgatccgggtggaaaactggatcttccggaaccccggctttgccctggctgccgctgctattgcttggctgctgggcagcagcacctcccagaaagtgatctacctcgtgatgatcctgctgatcgcccctgcctacagcatccggtgtatcggcgtgtccaaccgggacttcgtggaaggcatgagcggcggcacatgggtggacgtggtgctggaacatggcggctgcgtgacagtgatggcccaggataagcccgccgtggacatcgagctcgtgaccaccaccgtgtccaatatggccgaagtgcggagctactgctacgaggccagcatcagcgacatggccagcgacagcagatgccctacacagggcgaggcctacctggataagcagtccgacacccagtacgtgtgcaagcggaccctggtggatagaggctggggcaatggctgcggcctgtttggcaagggcagcctcgtgacctgcgccaagttcgcctgcagcaagaagatgaccggcaagagcatccagcccgagaacctggaataccggatcatgctgagcgtgcacggctcccagcacagcggcatgatcgtgaacgacaccggccacgagacagacgagaaccgggccaaggtggaaatcacccccaacagccctagagccgaggccacactgggcggctttggatctctgggcctggactgcgagcctagaaccggcctggatttcagcgacctgtactacctgaccatgaacaacaagcactggctggtgcacaaagagtggttccacgacatccccctgccctggcatgctggcgctgatacaggcaccccccactggaacaacaaagaggctctggtggaattcaaggacgcccacgccaagcggcagaccgtggtggtgctgggatctcaggaaggcgccgtgcatacagctctggctggcgccctggaagccgaaatggatggcgccaaaggcagactgtcctccggccacctgaagtgccggctgaagatggacaagctgcggctgaagggcgtgtcctacagcctgtgtaccgccgccttcaccttcaccaagatccccgccgagacactgcacggcaccgtgactgtggaagtgcagtacgccggcaccgacggcccttgtaaagtgcctgctcagatggccgtggatatgcagaccctgacccccgtgggcagactgatcaccgccaaccctgtgatcaccgagagcaccgagaacagcaagatgatgctggaactggacccccccttcggcgactcctacatcgtgatcggcgtgggagagaagaagatcacccaccactggcacagatccggcagcaccatcggcaaggcctttgaggctacagtgcggggagccaagagaatggccgtgctgggcgataccgcctgggattttggctctgtgggcggagccctgaacagcctgggaaagggcatccaccagatcttcggcgctgccttcaagagcctgttcggcggcatgagctggttcagccagatcctgatcggcaccctgctcgtgtggctgggcctgaacaccaagaacggcagcatctccctgacctgcctggctctgggcggcgtgctgatctttctgagcacagccgtgtccgcctgataataggctggagcctcggtggccatgcttcttgccccttgggcctccccccagcccctcctccccttcctgcacccgtacccccgtggtctttgaataaagtctgagtgggcggc

SEQ ID NO: 139 - RNA, 2070 nt, unidentified
  source 1..2070: mol_type = genomic RNA; note = Zika Virus
atggactggacctggatcctgttcctggtggccgctgccacaagagtgcacagcgtggaagtgaccagacggggcagcgcctactacatgtacctggacagaagcgacgccggcgaggccatcagctttccaaccaccctgggcatgaacaagtgctacatccagatcatggacctgggccacatgtgcgacgccaccatgagctacgagtgccccatgctggacgagggcgtggaacccgacgatgtggactgctggtgcaacaccaccagcacctgggtggtgtacggcacctgtcaccacaagaagggcgaagccagacggtccagacgggccgtgacactgcctagccacagcaccagaaagctgcagacccggtcccagacctggctggaaagcagagagtacaccaagcacctgatccgggtggaaaactggatcttccggaaccccggctttgccctggctgccgctgctattgcttggctgctgggcagcagcacctcccagaaagtgatctacctcgtgatgatcctgctgatcgcccctgcctacagcatccggtgtatcggcgtgtccaaccgggacttcgtggaaggcatgagcggcggcacatgggtggacgtggtgctggaacatggcggctgcgtgacagtgatggcccaggataagcccgccgtggacatcgagctcgtgaccaccaccgtgtccaatatggccgaagtgcggagctactgctacgaggccagcatcagcgacatggccagcgacagcagatgccctacacagggcgaggcctacctggataagcagtccgacacccagtacgtgtgcaagcggaccctggtggatagaggctggggcaatggctgcggcctgtttggcaagggcagcctcgtgacctgcgccaagttcgcctgcagcaagaagatgaccggcaagagcatccagcccgagaacctggaataccggatcatgctgagcgtgcacggctcccagcacagcggcatgatcgtgaacgacaccggccacgagacagacgagaaccgggccaaggtggaaatcacccccaacagccctagagccgaggccacactgggcggctttggatctctgggcctggactgcgagcctagaaccggcctggatttcagcgacctgtactacctgaccatgaacaacaagcactggctggtgcacaaagagtggttccacgacatccccctgccctggcatgctggcgctgatacaggcaccccccactggaacaacaaagaggctctggtggaattcaaggacgcccacgccaagcggcagaccgtggtggtgctgggatctcaggaaggcgccgtgcatacagctctggctggcgccctggaagccgaaatggatggcgccaaaggcagactgtcctccggccacctgaagtgccggctgaagatggacaagctgcggctgaagggcgtgtcctacagcctgtgtaccgccgccttcaccttcaccaagatccccgccgagacactgcacggcaccgtgactgtggaagtgcagtacgccggcaccgacggcccttgtaaagtgcctgctcagatggccgtggatatgcagaccctgacccccgtgggcagactgatcaccgccaaccctgtgatcaccgagagcaccgagaacagcaagatgatgctggaactggacccccccttcggcgactcctacatcgtgatcggcgtgggagagaagaagatcacccaccactggcacagatccggcagcaccatcggcaaggcctttgaggctacagtgcggggagccaagagaatggccgtgctgggcgataccgcctgggattttggctctgtgggcggagccctgaacagcctgggaaagggcatccaccagatcttcggcgctgccttcaagagcctgttcggcggcatgagctggttcagccagatcctgatcggcaccctgctcgtgtggctgggcctgaacaccaagaacggcagcatctccctgacctgcctggctctgggcggcgtgctgatctttctgagcacagccgtgtccgcc

SEQ ID NO: 140 - RNA, 2342 nt, unidentified
  source 1..2342: mol_type = genomic RNA; note = Zika Virus
ggggaaataagagagaaaagaagagtaagaagaaatataagagccaccatggactggacctggatcctgttcctggtggccgctgccacaagagtgcacagcgtggaagtgaccagacggggcagcgcctactacatgtacctggacagaagcgacgccggcgaggccatcagctttccaaccaccctgggcatgaacaagtgctacatccagatcatggacctgggccacatgtgcgacgccaccatgagctacgagtgccccatgctggacgagggcgtggaacccgacgatgtggactgctggtgcaacaccaccagcacctgggtggtgtacggcacctgtcaccacaagaagggcgaagccagacggtccagacgggccgtgacactgcctagccacagcaccagaaagctgcagacccggtcccagacctggctggaaagcagagagtacaccaagcacctgatccgggtggaaaactggatcttccggaaccccggctttgccctggctgccgctgctattgcttggctgctgggcagcagcacctcccagaaagtgatctacctcgtgatgatcctgctgatcgcccctgcctacagcatccggtgtatcggcgtgtccaaccgggacttcgtggaaggcatgagcggcggcacatgggtggacgtggtgctggaacatggcggctgcgtgacagtgatggcccaggataagcccgccgtggacatcgagctcgtgaccaccaccgtgtccaatatggccgaagtgcggagctactgctacgaggccagcatcagcgacatggccagcgacagcagatgccctacacagggcgaggcctacctggataagcagtccgacacccagtacgtgtgcaagcggaccctggtggatagaggctggggcaatggctgcggcctgtttggcaagggcagcctcgtgacctgcgccaagttcgcctgcagcaagaagatgaccggcaagagcatccagcccgagaacctggaataccggatcatgctgagcgtgcacggctcccagcacagcggcatgatcgtgaacgacaccggccacgagacagacgagaaccgggccaaggtggaaatcacccccaacagccctagagccgaggccacactgggcggctttggatctctgggcctggactgcgagcctagaaccggcctggatttcagcgacctgtactacctgaccatgaacaacaagcactggctggtgcacaaagagtggttccacgacatccccctgccctggcatgctggcgctgatacaggcaccccccactggaacaacaaagaggctctggtggaattcaaggacgcccacgccaagcggcagaccgtggtggtgctgggatctcaggaaggcgccgtgcatacagctctggctggcgccctggaagccgaaatggatggcgccaaaggcagactgtcctccggccacctgaagtgccggctgaagatggacaagctgcggctgaagggcgtgtcctacagcctgtgtaccgccgccttcaccttcaccaagatccccgccgagacactgcacggcaccgtgactgtggaagtgcagtacgccggcaccgacggcccttgtaaagtgcctgctcagatggccgtggatatgcagaccctgacccccgtgggcagactgatcaccgccaaccctgtgatcaccgagagcaccgagaacagcaagatgatgctggaactggacccccccttcggcgactcctacatcgtgatcggcgtgggagagaagaagatcacccaccactggcacagatccggcagcaccatcggcaaggcctttgaggctacagtgcggggagccaagagaatggccgtgctgggcgataccgcctgggattttggctctgtgggcggagccctgaacagcctgggaaagggcatccaccagatcttcggcgctgccttcaagagcctgttcggcggcatgagctggttcagccagatcctgatcggcaccctgctcgtgtggctgggcctgaacaccaagaacggcagcatctccctgacctgcctggctctgggcggcgtgctgatctttctgagcacagccgtgtccgcctgataataggctggagcctcggtggccatgcttcttgccccttgggcctccccccagcccctcctccccttcctgcacccgtacccccgtggtctttgaataaagtctgagtgggcggcaaaaaaaaaaaaaaaaaaaaaaaaaaaaaaaaaaaaaaaaaaaaaaaaaaaaaaaaaaaaaaaaaaaaaaaaaaaaaaaaaaaaaaaaaaaaaaaaaaaatctag

SEQ ID NO: 141 - RNA, 2272 nt, unidentified
  source 1..2272: mol_type = genomic RNA; note = Zika Virus
tcaagcttttggaccctcgtacagaagctaatacgactcactatagggaaataagagagaaaagaagagtaagaagaaatataagagccaccatggactggacctggatcctgttcctggtggccgctgccacaagagtgcacagcaccagaagaggcagcgcctactacatgtacctggacagaagcgacgccggcgaggccatcagctttccaaccaccctgggcatgaacaagtgctacatccagatcatggacctgggccacatgtgcgacgccaccatgagctacgagtgccccatgctggacgagggcgtggaacccgacgatgtggactgctggtgcaacaccaccagcacctgggtggtgtacggcacctgtcaccacaagaagggcgaagccagacggtccagacgggccgtgacactgcctagccactccaccagaaagctgcagacccggtcccagacctggctggaaagcagagagtacaccaagcacctgatccgggtggaaaactggatcttccggaaccccggctttgccctggctgccgctgctattgcttggctgctgggcagcagcacctcccagaaagtgatctacctcgtgatgatcctgctgatcgcccctgcctacagcatccggtgtatcggcgtgtccaaccgggacttcgtggaaggcatgagcggcggcacatgggtggacgtggtgctggaacatggcggctgcgtgacagtgatggcccaggataagcccgccgtggacatcgagctcgtgaccaccaccgtgtccaatatggccgaagtgcggagctactgctacgaggccagcatcagcgacatggccagcgacagcagatgccctacacagggcgaggcctacctggataagcagtccgacacccagtacgtgtgcaagcggaccctggtggatagaggctggggcaatggctgcggcctgtttggcaagggcagcctcgtgacctgcgccaagttcgcctgcagcaagaagatgaccggcaagagcatccagcccgagaacctggaataccggatcatgctgagcgtgcacggctcccagcacagcggcatgatcgtgaacgacaccggccacgagacagacgagaaccgggccaaggtggaaatcacccccaacagccctagagccgaggccacactgggcggctttggatctctgggcctggactgcgagcctagaaccggcctggatttcagcgacctgtactacctgaccatgaacaacaagcactggctggtgcacaaagagtggttccacgacatccccctgccctggcatgctggcgctgatacaggcaccccccactggaacaacaaagaggctctggtggaattcaaggacgcccacgccaagcggcagaccgtggtggtgctgggatctcaggaaggcgccgtgcatacagctctggctggcgccctggaagccgaaatggatggcgccaaaggcagactgtcctccggccacctgaagtgccggctgaagatggacaagctgcggctgaagggcgtgtcctacagcctgtgtaccgccgccttcaccttcaccaagatccccgccgagacactgcacggcaccgtgactgtggaagtgcagtacgccggcaccgacggcccttgtaaagtgcctgctcagatggccgtggatatgcagaccctgacccccgtgggcagactgatcaccgccaaccctgtgatcaccgagagcaccgagaacagcaagatgatgctggaactggacccccccttcggcgactcctacatcgtgatcggcgtgggagagaagaagatcacccaccactggcacagatccggcagcaccatcggcaaggcctttgaggctacagtgcggggagccaagagaatggccgtgctgggcgataccgcctgggattttggctctgtgggcggagccctgaacagcctgggaaagggcatccaccagatcttcggagccgcctttaagagcctgttcggcggcatgagctggttcagccagatcctgatcggcaccctgctcgtgtggctgggcctgaacaccaagaacggcagcatctccctgacctgcctggctctgggcggcgtgctgatctttctgagcacagccgtgtccgcctgataataggctggagcctcggtggccatgcttcttgccccttgggcctccccccagcccctcctccccttcctgcacccgtacccccgtggtctttgaataaagtctgagtgggcggc

SEQ ID NO: 142 - RNA, 2061 nt, unidentified
  source 1..2061: mol_type = genomic RNA; note = Zika Virus
atggactggacctggatcctgttcctggtggccgctgccacaagagtgcacagcaccagaagaggcagcgcctactacatgtacctggacagaagcgacgccggcgaggccatcagctttccaaccaccctgggcatgaacaagtgctacatccagatcatggacctgggccacatgtgcgacgccaccatgagctacgagtgccccatgctggacgagggcgtggaacccgacgatgtggactgctggtgcaacaccaccagcacctgggtggtgtacggcacctgtcaccacaagaagggcgaagccagacggtccagacgggccgtgacactgcctagccactccaccagaaagctgcagacccggtcccagacctggctggaaagcagagagtacaccaagcacctgatccgggtggaaaactggatcttccggaaccccggctttgccctggctgccgctgctattgcttggctgctgggcagcagcacctcccagaaagtgatctacctcgtgatgatcctgctgatcgcccctgcctacagcatccggtgtatcggcgtgtccaaccgggacttcgtggaaggcatgagcggcggcacatgggtggacgtggtgctggaacatggcggctgcgtgacagtgatggcccaggataagcccgccgtggacatcgagctcgtgaccaccaccgtgtccaatatggccgaagtgcggagctactgctacgaggccagcatcagcgacatggccagcgacagcagatgccctacacagggcgaggcctacctggataagcagtccgacacccagtacgtgtgcaagcggaccctggtggatagaggctggggcaatggctgcggcctgtttggcaagggcagcctcgtgacctgcgccaagttcgcctgcagcaagaagatgaccggcaagagcatccagcccgagaacctggaataccggatcatgctgagcgtgcacggctcccagcacagcggcatgatcgtgaacgacaccggccacgagacagacgagaaccgggccaaggtggaaatcacccccaacagccctagagccgaggccacactgggcggctttggatctctgggcctggactgcgagcctagaaccggcctggatttcagcgacctgtactacctgaccatgaacaacaagcactggctggtgcacaaagagtggttccacgacatccccctgccctggcatgctggcgctgatacaggcaccccccactggaacaacaaagaggctctggtggaattcaaggacgcccacgccaagcggcagaccgtggtggtgctgggatctcaggaaggcgccgtgcatacagctctggctggcgccctggaagccgaaatggatggcgccaaaggcagactgtcctccggccacctgaagtgccggctgaagatggacaagctgcggctgaagggcgtgtcctacagcctgtgtaccgccgccttcaccttcaccaagatccccgccgagacactgcacggcaccgtgactgtggaagtgcagtacgccggcaccgacggcccttgtaaagtgcctgctcagatggccgtggatatgcagaccctgacccccgtgggcagactgatcaccgccaaccctgtgatcaccgagagcaccgagaacagcaagatgatgctggaactggacccccccttcggcgactcctacatcgtgatcggcgtgggagagaagaagatcacccaccactggcacagatccggcagcaccatcggcaaggcctttgaggctacagtgcggggagccaagagaatggccgtgctgggcgataccgcctgggattttggctctgtgggcggagccctgaacagcctgggaaagggcatccaccagatcttcggagccgcctttaagagcctgttcggcggcatgagctggttcagccagatcctgatcggcaccctgctcgtgtggctgggcctgaacaccaagaacggcagcatctccctgacctgcctggctctgggcggcgtgctgatctttctgagcacagccgtgtccgcc

SEQ ID NO: 143 - RNA, 2333 nt, unidentified
  source 1..2333: mol_type = genomic RNA; note = Zika Virus
ggggaaataagagagaaaagaagagtaagaagaaatataagagccaccatggactggacctggatcctgttcctggtggccgctgccacaagagtgcacagcaccagaagaggcagcgcctactacatgtacctggacagaagcgacgccggcgaggccatcagctttccaaccaccctgggcatgaacaagtgctacatccagatcatggacctgggccacatgtgcgacgccaccatgagctacgagtgccccatgctggacgagggcgtggaacccgacgatgtggactgctggtgcaacaccaccagcacctgggtggtgtacggcacctgtcaccacaagaagggcgaagccagacggtccagacgggccgtgacactgcctagccactccaccagaaagctgcagacccggtcccagacctggctggaaagcagagagtacaccaagcacctgatccgggtggaaaactggatcttccggaaccccggctttgccctggctgccgctgctattgcttggctgctgggcagcagcacctcccagaaagtgatctacctcgtgatgatcctgctgatcgcccctgcctacagcatccggtgtatcggcgtgtccaaccgggacttcgtggaaggcatgagcggcggcacatgggtggacgtggtgctggaacatggcggctgcgtgacagtgatggcccaggataagcccgccgtggacatcgagctcgtgaccaccaccgtgtccaatatggccgaagtgcggagctactgctacgaggccagcatcagcgacatggccagcgacagcagatgccctacacagggcgaggcctacctggataagcagtccgacacccagtacgtgtgcaagcggaccctggtggatagaggctggggcaatggctgcggcctgtttggcaagggcagcctcgtgacctgcgccaagttcgcctgcagcaagaagatgaccggcaagagcatccagcccgagaacctggaataccggatcatgctgagcgtgcacggctcccagcacagcggcatgatcgtgaacgacaccggccacgagacagacgagaaccgggccaaggtggaaatcacccccaacagccctagagccgaggccacactgggcggctttggatctctgggcctggactgcgagcctagaaccggcctggatttcagcgacctgtactacctgaccatgaacaacaagcactggctggtgcacaaagagtggttccacgacatccccctgccctggcatgctggcgctgatacaggcaccccccactggaacaacaaagaggctctggtggaattcaaggacgcccacgccaagcggcagaccgtggtggtgctgggatctcaggaaggcgccgtgcatacagctctggctggcgccctggaagccgaaatggatggcgccaaaggcagactgtcctccggccacctgaagtgccggctgaagatggacaagctgcggctgaagggcgtgtcctacagcctgtgtaccgccgccttcaccttcaccaagatccccgccgagacactgcacggcaccgtgactgtggaagtgcagtacgccggcaccgacggcccttgtaaagtgcctgctcagatggccgtggatatgcagaccctgacccccgtgggcagactgatcaccgccaaccctgtgatcaccgagagcaccgagaacagcaagatgatgctggaactggacccccccttcggcgactcctacatcgtgatcggcgtgggagagaagaagatcacccaccactggcacagatccggcagcaccatcggcaaggcctttgaggctacagtgcggggagccaagagaatggccgtgctgggcgataccgcctgggattttggctctgtgggcggagccctgaacagcctgggaaagggcatccaccagatcttcggagccgcctttaagagcctgttcggcggcatgagctggttcagccagatcctgatcggcaccctgctcgtgtggctgggcctgaacaccaagaacggcagcatctccctgacctgcctggctctgggcggcgtgctgatctttctgagcacagccgtgtccgcctgataataggctggagcctcggtggccatgcttcttgccccttgggcctccccccagcccctcctccccttcctgcacccgtacccccgtggtctttgaataaagtctgagtgggcggcaaaaaaaaaaaaaaaaaaaaaaaaaaaaaaaaaaaaaaaaaaaaaaaaaaaaaaaaaaaaaaaaaaaaaaaaaaaaaaaaaaaaaaaaaaaaaaaaaaaatctag

SEQ ID NO: 144 - RNA, 2287 nt, unidentified
  source 1..2287: mol_type = genomic RNA; note = Zika Virus
tcaagcttttggaccctcgtacagaagctaatacgactcactatagggaaataagagagaaaagaagagtaagaagaaatataagagccaccatggaaacccctgcccagctgctgttcctgctgctgctgtggctgcctgataccaccggcgtggaagtgaccagaagaggcagcgcctactacatgtacctggacagaagcgacgccggcgaggccatcagctttccaaccaccctgggcatgaacaagtgctacatccagatcatggacctgggccacatgtgcgacgccaccatgagctacgagtgccccatgctggacgagggcgtggaacccgacgatgtggactgctggtgcaacaccaccagcacctgggtggtgtacggcacctgtcaccacaagaagggcgaagccagacggtccagacgggccgtgacactgcctagccactccaccagaaagctgcagacccggtcccagacctggctggaaagcagagagtacaccaagcacctgatccgggtggaaaactggatcttccggaaccccggctttgccctggccgctgctgctattgcttggctgctgggcagcagcacctcccagaaagtgatctacctcgtgatgatcctgctgatcgcccctgcctacagcatccggtgtatcggcgtgtccaaccgggacttcgtggaaggcatgagcggcggcacatgggtggacgtggtgctggaacatggcggctgcgtgacagtgatggcccaggataagcccgccgtggacatcgagctcgtgaccaccaccgtgtccaatatggccgaagtgcggagctactgctacgaggccagcatcagcgacatggccagcgacagcagatgccctacacagggcgaggcctacctggataagcagtccgacacccagtacgtgtgcaagcggaccctggtggatagaggctggggcaatggctgcggcctgtttggcaagggcagcctcgtgacctgcgccaagttcgcctgcagcaagaagatgaccggcaagagcatccagcccgagaacctggaataccggatcatgctgagcgtgcacggcagccagcactccggcatgatcgtgaacgacaccggccacgagacagacgagaaccgggccaaggtggaaatcacccccaacagccctagagccgaggccacactgggcggctttggatctctgggcctggactgcgagcctagaaccggcctggatttcagcgacctgtactacctgaccatgaacaacaagcactggctggtgcacaaagagtggttccacgacatccccctgccctggcatgccggcgctgatacaggcacaccccactggaacaacaaagaggctctggtggaattcaaggacgcccacgccaagcggcagaccgtggtggtgctgggatctcaggaaggcgccgtgcatacagctctggctggcgccctggaagccgaaatggatggcgccaaaggcagactgtccagcggccacctgaagtgccggctgaagatggacaagctgcggctgaagggcgtgtcctacagcctgtgtaccgccgccttcaccttcaccaagatccccgccgagacactgcacggcaccgtgactgtggaagtgcagtacgccggcaccgacggcccttgtaaagtgcctgctcagatggccgtggatatgcagaccctgacccccgtgggcagactgatcaccgccaaccctgtgatcaccgagagcaccgagaacagcaagatgatgctggaactggacccccccttcggcgactcctacatcgtgatcggcgtgggagagaagaagatcacccaccactggcaccgcagcggcagcacaatcggcaaggcctttgaagccacagtgcggggagccaagagaatggccgtgctgggagataccgcctgggactttggctctgtgggcggagccctgaactctctgggcaagggaatccaccagatcttcggagccgcctttaagagcctgttcggcggcatgagctggttcagccagatcctgatcggcaccctgctcgtgtggctgggcctgaacaccaagaacggcagcatctccctgacctgcctggctctgggaggcgtgctgatctttctgagcaccgccgtgtctgcctgataataggctggagcctcggtggccatgcttcttgccccttgggcctccccccagcccctcctccccttcctgcacccgtacccccgtggtctttgaataaagtctgagtgggcggc

SEQ ID NO: 145 - RNA, 2076 nt, unidentified
  source 1..2076: mol_type = genomic RNA; note = Zika Virus
atggaaacccctgcccagctgctgttcctgctgctgctgtggctgcctgataccaccggcgtggaagtgaccagaagaggcagcgcctactacatgtacctggacagaagcgacgccggcgaggccatcagctttccaaccaccctgggcatgaacaagtgctacatccagatcatggacctgggccacatgtgcgacgccaccatgagctacgagtgccccatgctggacgagggcgtggaacccgacgatgtggactgctggtgcaacaccaccagcacctgggtggtgtacggcacctgtcaccacaagaagggcgaagccagacggtccagacgggccgtgacactgcctagccactccaccagaaagctgcagacccggtcccagacctggctggaaagcagagagtacaccaagcacctgatccgggtggaaaactggatcttccggaaccccggctttgccctggccgctgctgctattgcttggctgctgggcagcagcacctcccagaaagtgatctacctcgtgatgatcctgctgatcgcccctgcctacagcatccggtgtatcggcgtgtccaaccgggacttcgtggaaggcatgagcggcggcacatgggtggacgtggtgctggaacatggcggctgcgtgacagtgatggcccaggataagcccgccgtggacatcgagctcgtgaccaccaccgtgtccaatatggccgaagtgcggagctactgctacgaggccagcatcagcgacatggccagcgacagcagatgccctacacagggcgaggcctacctggataagcagtccgacacccagtacgtgtgcaagcggaccctggtggatagaggctggggcaatggctgcggcctgtttggcaagggcagcctcgtgacctgcgccaagttcgcctgcagcaagaagatgaccggcaagagcatccagcccgagaacctggaataccggatcatgctgagcgtgcacggcagccagcactccggcatgatcgtgaacgacaccggccacgagacagacgagaaccgggccaaggtggaaatcacccccaacagccctagagccgaggccacactgggcggctttggatctctgggcctggactgcgagcctagaaccggcctggatttcagcgacctgtactacctgaccatgaacaacaagcactggctggtgcacaaagagtggttccacgacatccccctgccctggcatgccggcgctgatacaggcacaccccactggaacaacaaagaggctctggtggaattcaaggacgcccacgccaagcggcagaccgtggtggtgctgggatctcaggaaggcgccgtgcatacagctctggctggcgccctggaagccgaaatggatggcgccaaaggcagactgtccagcggccacctgaagtgccggctgaagatggacaagctgcggctgaagggcgtgtcctacagcctgtgtaccgccgccttcaccttcaccaagatccccgccgagacactgcacggcaccgtgactgtggaagtgcagtacgccggcaccgacggcccttgtaaagtgcctgctcagatggccgtggatatgcagaccctgacccccgtgggcagactgatcaccgccaaccctgtgatcaccgagagcaccgagaacagcaagatgatgctggaactggacccccccttcggcgactcctacatcgtgatcggcgtgggagagaagaagatcacccaccactggcaccgcagcggcagcacaatcggcaaggcctttgaagccacagtgcggggagccaagagaatggccgtgctgggagataccgcctgggactttggctctgtgggcggagccctgaactctctgggcaagggaatccaccagatcttcggagccgcctttaagagcctgttcggcggcatgagctggttcagccagatcctgatcggcaccctgctcgtgtggctgggcctgaacaccaagaacggcagcatctccctgacctgcctggctctgggaggcgtgctgatctttctgagcaccgccgtgtctgcc

SEQ ID NO: 146 - RNA, 2348 nt, unidentified
  source 1..2348: mol_type = genomic RNA; note = Zika Virus
ggggaaataagagagaaaagaagagtaagaagaaatataagagccaccatggaaacccctgcccagctgctgttcctgctgctgctgtggctgcctgataccaccggcgtggaagtgaccagaagaggcagcgcctactacatgtacctggacagaagcgacgccggcgaggccatcagctttccaaccaccctgggcatgaacaagtgctacatccagatcatggacctgggccacatgtgcgacgccaccatgagctacgagtgccccatgctggacgagggcgtggaacccgacgatgtggactgctggtgcaacaccaccagcacctgggtggtgtacggcacctgtcaccacaagaagggcgaagccagacggtccagacgggccgtgacactgcctagccactccaccagaaagctgcagacccggtcccagacctggctggaaagcagagagtacaccaagcacctgatccgggtggaaaactggatcttccggaaccccggctttgccctggccgctgctgctattgcttggctgctgggcagcagcacctcccagaaagtgatctacctcgtgatgatcctgctgatcgcccctgcctacagcatccggtgtatcggcgtgtccaaccgggacttcgtggaaggcatgagcggcggcacatgggtggacgtggtgctggaacatggcggctgcgtgacagtgatggcccaggataagcccgccgtggacatcgagctcgtgaccaccaccgtgtccaatatggccgaagtgcggagctactgctacgaggccagcatcagcgacatggccagcgacagcagatgccctacacagggcgaggcctacctggataagcagtccgacacccagtacgtgtgcaagcggaccctggtggatagaggctggggcaatggctgcggcctgtttggcaagggcagcctcgtgacctgcgccaagttcgcctgcagcaagaagatgaccggcaagagcatccagcccgagaacctggaataccggatcatgctgagcgtgcacggcagccagcactccggcatgatcgtgaacgacaccggccacgagacagacgagaaccgggccaaggtggaaatcacccccaacagccctagagccgaggccacactgggcggctttggatctctgggcctggactgcgagcctagaaccggcctggatttcagcgacctgtactacctgaccatgaacaacaagcactggctggtgcacaaagagtggttccacgacatccccctgccctggcatgccggcgctgatacaggcacaccccactggaacaacaaagaggctctggtggaattcaaggacgcccacgccaagcggcagaccgtggtggtgctgggatctcaggaaggcgccgtgcatacagctctggctggcgccctggaagccgaaatggatggcgccaaaggcagactgtccagcggccacctgaagtgccggctgaagatggacaagctgcggctgaagggcgtgtcctacagcctgtgtaccgccgccttcaccttcaccaagatccccgccgagacactgcacggcaccgtgactgtggaagtgcagtacgccggcaccgacggcccttgtaaagtgcctgctcagatggccgtggatatgcagaccctgacccccgtgggcagactgatcaccgccaaccctgtgatcaccgagagcaccgagaacagcaagatgatgctggaactggacccccccttcggcgactcctacatcgtgatcggcgtgggagagaagaagatcacccaccactggcaccgcagcggcagcacaatcggcaaggcctttgaagccacagtgcggggagccaagagaatggccgtgctgggagataccgcctgggactttggctctgtgggcggagccctgaactctctgggcaagggaatccaccagatcttcggagccgcctttaagagcctgttcggcggcatgagctggttcagccagatcctgatcggcaccctgctcgtgtggctgggcctgaacaccaagaacggcagcatctccctgacctgcctggctctgggaggcgtgctgatctttctgagcaccgccgtgtctgcctgataataggctggagcctcggtggccatgcttcttgccccttgggcctccccccagcccctcctccccttcctgcacccgtacccccgtggtctttgaataaagtctgagtgggcggcaaaaaaaaaaaaaaaaaaaaaaaaaaaaaaaaaaaaaaaaaaaaaaaaaaaaaaaaaaaaaaaaaaaaaaaaaaaaaaaaaaaaaaaaaaaaaaaaaaaatctag

SEQ ID NO: 147 - RNA, 2278 nt, unidentified
  source 1..2278: mol_type = genomic RNA; note = Zika Virus
tcaagcttttggaccctcgtacagaagctaatacgactcactatagggaaataagagagaaaagaagagtaagaagaaatataagagccaccatggaaacccctgcccagctgctgttcctgctgctgctgtggctgcctgataccaccggcaccagaagaggcagcgcctactacatgtacctggacagaagcgacgccggcgaggccatcagctttccaaccaccctgggcatgaacaagtgctacatccagatcatggacctgggccacatgtgcgacgccaccatgagctacgagtgccccatgctggacgagggcgtggaacccgacgatgtggactgctggtgcaacaccaccagcacctgggtggtgtacggcacctgtcaccacaagaagggcgaagccagacggtccagacgggccgtgacactgcctagccactccaccagaaagctgcagacccggtcccagacctggctggaaagcagagagtacaccaagcacctgatccgggtggaaaactggatcttccggaaccccggctttgccctggccgctgctgctattgcttggctgctgggcagcagcacctcccagaaagtgatctacctcgtgatgatcctgctgatcgcccctgcctacagcatccggtgtatcggcgtgtccaaccgggacttcgtggaaggcatgagcggcggcacatgggtggacgtggtgctggaacatggcggctgcgtgacagtgatggcccaggataagcccgccgtggacatcgagctcgtgaccaccaccgtgtccaatatggccgaagtgcggagctactgctacgaggccagcatcagcgacatggccagcgacagcagatgccctacacagggcgaggcctacctggataagcagtccgacacccagtacgtgtgcaagcggaccctggtggatagaggctggggcaatggctgcggcctgtttggcaagggcagcctcgtgacctgcgccaagttcgcctgcagcaagaagatgaccggcaagagcatccagcccgagaacctggaataccggatcatgctgagcgtgcacggcagccagcactccggcatgatcgtgaacgacaccggccacgagacagacgagaaccgggccaaggtggaaatcacccccaacagccctagagccgaggccacactgggcggctttggatctctgggcctggactgcgagcctagaaccggcctggatttcagcgacctgtactacctgaccatgaacaacaagcactggctggtgcacaaagagtggttccacgacatccccctgccctggcatgccggcgctgatacaggcacaccccactggaacaacaaagaggctctggtggaattcaaggacgcccacgccaagcggcagaccgtggtggtgctgggatctcaggaaggcgccgtgcatacagctctggctggcgccctggaagccgaaatggatggcgccaaaggcagactgtccagcggccacctgaagtgccggctgaagatggacaagctgcggctgaagggcgtgtcctacagcctgtgtaccgccgccttcaccttcaccaagatccccgccgagacactgcacggcaccgtgactgtggaagtgcagtacgccggcaccgacggcccttgtaaagtgcctgctcagatggccgtggatatgcagaccctgacccccgtgggcagactgatcaccgccaaccctgtgatcaccgagagcaccgagaacagcaagatgatgctggaactggacccccccttcggcgactcctacatcgtgatcggcgtgggagagaagaagatcacccaccactggcaccgcagcggcagcacaatcggcaaggcctttgaagccacagtgcggggagccaagagaatggccgtgctgggagataccgcctgggactttggctctgtgggcggagccctgaactctctgggcaagggaatccaccagatcttcggagccgcctttaagagcctgttcggcggcatgagctggttcagccagatcctgatcggcaccctgctcgtgtggctgggcctgaacaccaagaacggcagcatctccctgacctgcctggctctgggaggcgtgctgatctttctgagcaccgccgtgtctgcctgataataggctggagcctcggtggccatgcttcttgccccttgggcctccccccagcccctcctccccttcctgcacccgtacccccgtggtctttgaataaagtctgagtgggcggc

SEQ ID NO: 148 - RNA, 2067 nt, unidentified
  source 1..2067: mol_type = genomic RNA; note = Zika Virus
atggaaacccctgcccagctgctgttcctgctgctgctgtggctgcctgataccaccggcaccagaagaggcagcgcctactacatgtacctggacagaagcgacgccggcgaggccatcagctttccaaccaccctgggcatgaacaagtgctacatccagatcatggacctgggccacatgtgcgacgccaccatgagctacgagtgccccatgctggacgagggcgtggaacccgacgatgtggactgctggtgcaacaccaccagcacctgggtggtgtacggcacctgtcaccacaagaagggcgaagccagacggtccagacgggccgtgacactgcctagccactccaccagaaagctgcagacccggtcccagacctggctggaaagcagagagtacaccaagcacctgatccgggtggaaaactggatcttccggaaccccggctttgccctggccgctgctgctattgcttggctgctgggcagcagcacctcccagaaagtgatctacctcgtgatgatcctgctgatcgcccctgcctacagcatccggtgtatcggcgtgtccaaccgggacttcgtggaaggcatgagcggcggcacatgggtggacgtggtgctggaacatggcggctgcgtgacagtgatggcccaggataagcccgccgtggacatcgagctcgtgaccaccaccgtgtccaatatggccgaagtgcggagctactgctacgaggccagcatcagcgacatggccagcgacagcagatgccctacacagggcgaggcctacctggataagcagtccgacacccagtacgtgtgcaagcggaccctggtggatagaggctggggcaatggctgcggcctgtttggcaagggcagcctcgtgacctgcgccaagttcgcctgcagcaagaagatgaccggcaagagcatccagcccgagaacctggaataccggatcatgctgagcgtgcacggcagccagcactccggcatgatcgtgaacgacaccggccacgagacagacgagaaccgggccaaggtggaaatcacccccaacagccctagagccgaggccacactgggcggctttggatctctgggcctggactgcgagcctagaaccggcctggatttcagcgacctgtactacctgaccatgaacaacaagcactggctggtgcacaaagagtggttccacgacatccccctgccctggcatgccggcgctgatacaggcacaccccactggaacaacaaagaggctctggtggaattcaaggacgcccacgccaagcggcagaccgtggtggtgctgggatctcaggaaggcgccgtgcatacagctctggctggcgccctggaagccgaaatggatggcgccaaaggcagactgtccagcggccacctgaagtgccggctgaagatggacaagctgcggctgaagggcgtgtcctacagcctgtgtaccgccgccttcaccttcaccaagatccccgccgagacactgcacggcaccgtgactgtggaagtgcagtacgccggcaccgacggcccttgtaaagtgcctgctcagatggccgtggatatgcagaccctgacccccgtgggcagactgatcaccgccaaccctgtgatcaccgagagcaccgagaacagcaagatgatgctggaactggacccccccttcggcgactcctacatcgtgatcggcgtgggagagaagaagatcacccaccactggcaccgcagcggcagcacaatcggcaaggcctttgaagccacagtgcggggagccaagagaatggccgtgctgggagataccgcctgggactttggctctgtgggcggagccctgaactctctgggcaagggaatccaccagatcttcggagccgcctttaagagcctgttcggcggcatgagctggttcagccagatcctgatcggcaccctgctcgtgtggctgggcctgaacaccaagaacggcagcatctccctgacctgcctggctctgggaggcgtgctgatctttctgagcaccgccgtgtctgcc

SEQ ID NO: 149 - RNA, 2339 nt, unidentified
  source 1..2339: mol_type = genomic RNA; note = Zika Virus
ggggaaataagagagaaaagaagagtaagaagaaatataagagccaccatggaaacccctgcccagctgctgttcctgctgctgctgtggctgcctgataccaccggcaccagaagaggcagcgcctactacatgtacctggacagaagcgacgccggcgaggccatcagctttccaaccaccctgggcatgaacaagtgctacatccagatcatggacctgggccacatgtgcgacgccaccatgagctacgagtgccccatgctggacgagggcgtggaacccgacgatgtggactgctggtgcaacaccaccagcacctgggtggtgtacggcacctgtcaccacaagaagggcgaagccagacggtccagacgggccgtgacactgcctagccactccaccagaaagctgcagacccggtcccagacctggctggaaagcagagagtacaccaagcacctgatccgggtggaaaactggatcttccggaaccccggctttgccctggccgctgctgctattgcttggctgctgggcagcagcacctcccagaaagtgatctacctcgtgatgatcctgctgatcgcccctgcctacagcatccggtgtatcggcgtgtccaaccgggacttcgtggaaggcatgagcggcggcacatgggtggacgtggtgctggaacatggcggctgcgtgacagtgatggcccaggataagcccgccgtggacatcgagctcgtgaccaccaccgtgtccaatatggccgaagtgcggagctactgctacgaggccagcatcagcgacatggccagcgacagcagatgccctacacagggcgaggcctacctggataagcagtccgacacccagtacgtgtgcaagcggaccctggtggatagaggctggggcaatggctgcggcctgtttggcaagggcagcctcgtgacctgcgccaagttcgcctgcagcaagaagatgaccggcaagagcatccagcccgagaacctggaataccggatcatgctgagcgtgcacggcagccagcactccggcatgatcgtgaacgacaccggccacgagacagacgagaaccgggccaaggtggaaatcacccccaacagccctagagccgaggccacactgggcggctttggatctctgggcctggactgcgagcctagaaccggcctggatttcagcgacctgtactacctgaccatgaacaacaagcactggctggtgcacaaagagtggttccacgacatccccctgccctggcatgccggcgctgatacaggcacaccccactggaacaacaaagaggctctggtggaattcaaggacgcccacgccaagcggcagaccgtggtggtgctgggatctcaggaaggcgccgtgcatacagctctggctggcgccctggaagccgaaatggatggcgccaaaggcagactgtccagcggccacctgaagtgccggctgaagatggacaagctgcggctgaagggcgtgtcctacagcctgtgtaccgccgccttcaccttcaccaagatccccgccgagacactgcacggcaccgtgactgtggaagtgcagtacgccggcaccgacggcccttgtaaagtgcctgctcagatggccgtggatatgcagaccctgacccccgtgggcagactgatcaccgccaaccctgtgatcaccgagagcaccgagaacagcaagatgatgctggaactggacccccccttcggcgactcctacatcgtgatcggcgtgggagagaagaagatcacccaccactggcaccgcagcggcagcacaatcggcaaggcctttgaagccacagtgcggggagccaagagaatggccgtgctgggagataccgcctgggactttggctctgtgggcggagccctgaactctctgggcaagggaatccaccagatcttcggagccgcctttaagagcctgttcggcggcatgagctggttcagccagatcctgatcggcaccctgctcgtgtggctgggcctgaacaccaagaacggcagcatctccctgacctgcctggctctgggaggcgtgctgatctttctgagcaccgccgtgtctgcctgataataggctggagcctcggtggccatgcttcttgccccttgggcctccccccagcccctcctccccttcctgcacccgtacccccgtggtctttgaataaagtctgagtgggcggcaaaaaaaaaaaaaaaaaaaaaaaaaaaaaaaaaaaaaaaaaaaaaaaaaaaaaaaaaaaaaaaaaaaaaaaaaaaaaaaaaaaaaaaaaaaaaaaaaaaatctag

SEQ ID NO: 150 - RNA, 1783 nt, unidentified
  source 1..1783: mol_type = genomic RNA; note = Zika Virus
tcaagcttttggaccctcgtacagaagctaatacgactcactatagggaaataagagagaaaagaagagtaagaagaaatataagagccaccatggaaacccctgcccagctgctgttcctgctgctgctgtggctgcctgacaccaccggcatcagatgcatcggcgtgtccaaccgggacttcgtggaaggcatgagcggcggcacatgggtggacgtggtgctggaacatggcggctgcgtgacagtgatggcccaggataagcccgccgtggacatcgagctcgtgaccaccaccgtgtccaatatggccgaagtgcggagctactgctacgaggccagcatcagcgacatggccagcgacagcagatgccctacacagggcgaggcctacctggacaagcagagcgacacccagtacgtgtgcaagcggaccctggtggatagaggctggggcaatggctgcggcctgtttggcaagggcagcctcgtgacctgcgccaagttcgcctgcagcaagaagatgaccggcaagagcatccagcccgagaacctggaataccggatcatgctgagcgtgcacggcagccagcactccggcatgatcgtgaacgacaccggccacgagacagacgagaaccgggccaaggtggaaatcacccccaacagccctagagccgaggccacactgggcggctttggatctctgggcctggactgcgagcctagaaccggcctggatttcagcgacctgtactacctgaccatgaacaacaagcactggctggtgcacaaagagtggttccacgacatccccctgccctggcatgccggcgctgatacaggcacaccccactggaacaacaaagaggctctggtggaattcaaggacgcccacgccaagcggcagaccgtggtggtgctgggatctcaggaaggcgccgtgcatacagctctggctggcgccctggaagccgaaatggatggcgccaaaggcagactgagcagcggccacctgaagtgccggctgaagatggacaagctgcggctgaagggcgtgtcctacagcctgtgtaccgccgccttcaccttcaccaagatccccgccgagacactgcacggcaccgtgactgtggaagtgcagtacgccggcaccgacggcccttgtaaagtgcctgctcagatggccgtggatatgcagaccctgacccccgtgggcaggctgatcacagccaaccctgtgatcaccgagagcaccgagaacagcaagatgatgctggaactggacccccccttcggcgactcctacatcgtgatcggcgtgggagagaagaagatcacccaccactggcacagaagcggcagcaccatcggcaaggcctttgaggctacagtgcggggagccaagagaatggccgtgctgggagataccgcctgggactttggctctgtgggcggagccctgaactctctgggcaagggaatccaccagatcttcggcgctgccttcaagagcctgttcggcggcatgagctggttcagccagatcctgatcggcaccctgctcgtgtggctgggcctgaacaccaagaacggcagcatctccctgacctgcctggctctgggaggcgtgctgatctttctgagcaccgccgtgtctgcctgataataggctggagcctcggtggccatgcttcttgccccttgggcctccccccagcccctcctccccttcctgcacccgtacccccgtggtctttgaataaagtctgagtgggcggc

SEQ ID NO: 151 - RNA, 1572 nt, unidentified
  source 1..1572: mol_type = genomic RNA; note = Zika Virus
atggaaacccctgcccagctgctgttcctgctgctgctgtggctgcctgacaccaccggcatcagatgcatcggcgtgtccaaccgggacttcgtggaaggcatgagcggcggcacatgggtggacgtggtgctggaacatggcggctgcgtgacagtgatggcccaggataagcccgccgtggacatcgagctcgtgaccaccaccgtgtccaatatggccgaagtgcggagctactgctacgaggccagcatcagcgacatggccagcgacagcagatgccctacacagggcgaggcctacctggacaagcagagcgacacccagtacgtgtgcaagcggaccctggtggatagaggctggggcaatggctgcggcctgtttggcaagggcagcctcgtgacctgcgccaagttcgcctgcagcaagaagatgaccggcaagagcatccagcccgagaacctggaataccggatcatgctgagcgtgcacggcagccagcactccggcatgatcgtgaacgacaccggccacgagacagacgagaaccgggccaaggtggaaatcacccccaacagccctagagccgaggccacactgggcggctttggatctctgggcctggactgcgagcctagaaccggcctggatttcagcgacctgtactacctgaccatgaacaacaagcactggctggtgcacaaagagtggttccacgacatccccctgccctggcatgccggcgctgatacaggcacaccccactggaacaacaaagaggctctggtggaattcaaggacgcccacgccaagcggcagaccgtggtggtgctgggatctcaggaaggcgccgtgcatacagctctggctggcgccctggaagccgaaatggatggcgccaaaggcagactgagcagcggccacctgaagtgccggctgaagatggacaagctgcggctgaagggcgtgtcctacagcctgtgtaccgccgccttcaccttcaccaagatccccgccgagacactgcacggcaccgtgactgtggaagtgcagtacgccggcaccgacggcccttgtaaagtgcctgctcagatggccgtggatatgcagaccctgacccccgtgggcaggctgatcacagccaaccctgtgatcaccgagagcaccgagaacagcaagatgatgctggaactggacccccccttcggcgactcctacatcgtgatcggcgtgggagagaagaagatcacccaccactggcacagaagcggcagcaccatcggcaaggcctttgaggctacagtgcggggagccaagagaatggccgtgctgggagataccgcctgggactttggctctgtgggcggagccctgaactctctgggcaagggaatccaccagatcttcggcgctgccttcaagagcctgttcggcggcatgagctggttcagccagatcctgatcggcaccctgctcgtgtggctgggcctgaacaccaagaacggcagcatctccctgacctgcctggctctgggaggcgtgctgatctttctgagcaccgccgtgtctgcc

SEQ ID NO: 152 - RNA, 1844 nt, unidentified
  source 1..1844: mol_type = genomic RNA; note = Zika Virus
ggggaaataagagagaaaagaagagtaagaagaaatataagagccaccatggaaacccctgcccagctgctgttcctgctgctgctgtggctgcctgacaccaccggcatcagatgcatcggcgtgtccaaccgggacttcgtggaaggcatgagcggcggcacatgggtggacgtggtgctggaacatggcggctgcgtgacagtgatggcccaggataagcccgccgtggacatcgagctcgtgaccaccaccgtgtccaatatggccgaagtgcggagctactgctacgaggccagcatcagcgacatggccagcgacagcagatgccctacacagggcgaggcctacctggacaagcagagcgacacccagtacgtgtgcaagcggaccctggtggatagaggctggggcaatggctgcggcctgtttggcaagggcagcctcgtgacctgcgccaagttcgcctgcagcaagaagatgaccggcaagagcatccagcccgagaacctggaataccggatcatgctgagcgtgcacggcagccagcactccggcatgatcgtgaacgacaccggccacgagacagacgagaaccgggccaaggtggaaatcacccccaacagccctagagccgaggccacactgggcggctttggatctctgggcctggactgcgagcctagaaccggcctggatttcagcgacctgtactacctgaccatgaacaacaagcactggctggtgcacaaagagtggttccacgacatccccctgccctggcatgccggcgctgatacaggcacaccccactggaacaacaaagaggctctggtggaattcaaggacgcccacgccaagcggcagaccgtggtggtgctgggatctcaggaaggcgccgtgcatacagctctggctggcgccctggaagccgaaatggatggcgccaaaggcagactgagcagcggccacctgaagtgccggctgaagatggacaagctgcggctgaagggcgtgtcctacagcctgtgtaccgccgccttcaccttcaccaagatccccgccgagacactgcacggcaccgtgactgtggaagtgcagtacgccggcaccgacggcccttgtaaagtgcctgctcagatggccgtggatatgcagaccctgacccccgtgggcaggctgatcacagccaaccctgtgatcaccgagagcaccgagaacagcaagatgatgctggaactggacccccccttcggcgactcctacatcgtgatcggcgtgggagagaagaagatcacccaccactggcacagaagcggcagcaccatcggcaaggcctttgaggctacagtgcggggagccaagagaatggccgtgctgggagataccgcctgggactttggctctgtgggcggagccctgaactctctgggcaagggaatccaccagatcttcggcgctgccttcaagagcctgttcggcggcatgagctggttcagccagatcctgatcggcaccctgctcgtgtggctgggcctgaacaccaagaacggcagcatctccctgacctgcctggctctgggaggcgtgctgatctttctgagcaccgccgtgtctgcctgataataggctggagcctcggtggccatgcttcttgccccttgggcctccccccagcccctcctccccttcctgcacccgtacccccgtggtctttgaataaagtctgagtgggcggcaaaaaaaaaaaaaaaaaaaaaaaaaaaaaaaaaaaaaaaaaaaaaaaaaaaaaaaaaaaaaaaaaaaaaaaaaaaaaaaaaaaaaaaaaaaaaaaaaaaatctag

SEQ ID NO: 153 - RNA, 2088 nt, synthetic construct
  misc_feature 1..2088: note = Synthetic Polynucleotide
  source 1..2088: mol_type = other RNA
atgctgggcagcaacagcggccagagagtggtgttcaccatcctgctgctgctggtggcccctgcctacagcgccgaagtgacaagaagaggcagcgcctactacatgtacctggaccggaacgatgccggcgaggccatcagctttccaaccaccctgggcatgaacaagtgctacatccagatcatggacctgggccacatgtgcgacgccaccatgagctacgagtgccccatgctggacgagggcgtggaacccgacgatgtggactgctggtgcaataccaccagcacctgggtggtgtacggcacctgtcaccacaagaagggcgaagccagacggtccagacgggccgtgacactgcctagccacagcaccagaaagctgcagacccggtcccagacctggctggaaagcagagagtacaccaagcacctgatccgggtggaaaactggatcttccggaaccccggctttgccctggctgccgctgctattgcttggctgctgggctctagcaccagccagaaagtgatctacctcgtgatgatcctgctgatcgccccagcctactccatccggtgtatcggcgtgtccaaccgggacttcgtggaaggcatgagcggcggcacatgggtggacgtggtgctggaacatggcggctgcgtgacagtgatggcccaggacaagcccaccgtggacatcgagctcgtgaccaccaccgtgtccaatatggccgaagtgcggagctactgctacgaggccagcatcagcgacatggccagcgacagcagatgccctacacagggcgaggcctacctggacaagcagtccgacacccagtacgtgtgcaagcggaccctggtggacaggggctggggcaatggctgtggcctgtttggcaagggcagcctcgtgacctgcgccaagttcgcctgcagcaagaagatgaccggcaagagcatccagcccgagaacctggaataccggatcatgctgagcgtgcacggctcccagcacagcggcatgatcgtgaacgacaccggccacgagacagacgagaaccgggccaaggtggaaatcacccccaacagccctagagccgaggccacactgggcggctttggatctctgggcctggactgcgagcctagaaccggcctggatttcagcgacctgtactacctgaccatgaacaacaaacactggctggtgcacaaagagtggttccacgacatccccctgccctggcatgctggcgctgatacaggcaccccccactggaacaacaaagaggccctggtggaattcaaggacgcccacgccaagcggcagaccgtggtggtgctgggatctcaggaaggcgccgtgcatacagctctggctggcgccctggaagccgaaatggatggcgccaaaggcagactgagcagcggccacctgaagtgccggctgaagatggacaagctgcggctgaagggcgtgtcctacagcctgtgtaccgccgccttcaccttcaccaagatccccgccgagacactgcacggcaccgtgactgtggaagtgcagtacgccggcaccgacggcccttgtaaagtgcctgctcagatggccgtggatatgcagaccctgacccccgtgggcaggctgatcacagccaaccctgtgatcaccgagagcaccgagaacagcaagatgatgctggaactggacccccccttcggcgactcctacatcgtgatcggcgtgggagagaagaagatcacccaccactggcacagaagcggcagcaccatcggcaaggcctttgaggctacagtgcggggagccaagagaatggccgtgctgggcgataccgcctgggattttggctctgtgggcggagccctgaacagcctgggaaagggcatccaccagatcttcggagccgcctttaagagcctgttcggcggcatgagctggttcagccagatcctgatcggcaccctgctgatgtggctgggcctgaacaccaagaacggcagcatctccctgatgtgcctggctctgggcggcgtgctgatctttctgagcacagccgtgtccgcc

SEQ ID NO: 154 - RNA, 2064 nt, synthetic construct
  misc_feature 1..2064: note = Synthetic Polynucleotide
  source 1..2064: mol_type = other RNA
atgaagtgcctgctgtacctggccttcctgttcatcggcgtgaactgcgccgaagtgaccagaagaggcagcgcctactacatgtacctggaccggaacgatgccggcgaggccatcagctttccaaccaccctgggcatgaacaagtgctacatccagatcatggacctgggccacatgtgcgacgccaccatgagctacgagtgccccatgctggacgagggcgtggaacccgacgatgtggactgctggtgcaacaccaccagcacctgggtggtgtacggcacctgtcaccacaagaagggcgaagccagacggtccagacgggccgtgacactgcctagccacagcaccagaaagctgcagacccggtcccagacctggctggaaagcagagagtacaccaagcacctgatccgggtggaaaactggatcttccggaaccccggctttgccctggccgctgctgctattgcttggctgctgggcagcagcacctcccagaaagtgatctacctcgtgatgatcctgctgatcgcccctgcctacagcatccggtgtatcggcgtgtccaaccgggacttcgtggaaggcatgagcggcggcacatgggtggacgtggtgctggaacatggcggctgcgtgacagtgatggcccaggacaagcccaccgtggacatcgagctcgtgaccaccaccgtgtccaatatggccgaagtgcggagctactgctacgaggccagcatcagcgacatggccagcgacagcagatgccctacacagggcgaggcctacctggacaagcagtccgacacccagtacgtgtgcaagcggaccctggtggatagaggctggggcaatggctgcggcctgtttggcaagggcagcctcgtgacctgtgccaagttcgcctgcagcaagaagatgaccggcaagagcatccagcccgagaacctggaataccggatcatgctgagcgtgcacggcagccagcactccggcatgatcgtgaacgacaccggccacgagacagacgagaaccgggccaaggtggaaatcacccccaacagccctagagccgaggccacactgggcggctttggatctctgggcctggactgcgagcctagaaccggcctggatttcagcgacctgtactacctgaccatgaacaacaagcactggctggtgcacaaagagtggttccacgacatccccctgccctggcatgccggcgctgatacaggcacaccccactggaacaacaaagaggctctggtggaattcaaggacgcccacgccaagcggcagaccgtggtggtgctgggatctcaggaaggcgccgtgcatacagctctggctggcgccctggaagccgaaatggatggcgccaaaggcagactgtccagcggccacctgaagtgcagactgaagatggacaagctgcggctgaagggcgtgtcctacagcctgtgtaccgccgccttcaccttcaccaagatccccgccgagacactgcacggcaccgtgactgtggaagtgcagtacgccggcaccgacggcccttgtaaagtgccagctcagatggccgtggatatgcagaccctgacccccgtgggcagactgatcaccgccaaccctgtgatcaccgagagcaccgagaacagcaagatgatgctggaactggacccccccttcggcgactcctacatcgtgatcggcgtgggagagaagaagatcacccaccactggcacagaagcggcagcaccatcggcaaggcctttgaggctacagtgcggggagccaagagaatggccgtgctgggagataccgcctgggactttggctctgtgggcggagccctgaactctctgggcaagggaatccaccagatcttcggagccgcctttaagagcctgttcggcggcatgagctggttcagccagatcctgatcggcaccctgctgatgtggctgggcctgaacaccaagaacggcagcatctccctgatgtgcctggctctgggaggcgtgctgatcttcctgagcacagccgtgtctgcc

SEQ ID NO: 155 - RNA, 2070 nt, synthetic construct
  misc_feature 1..2070: note = Synthetic Polynucleotide
  source 1..2070: mol_type = other RNA
atggactggacctggatcctgttcctggtggccgctgccacaagagtgcacagcgtggaagtgaccagacggggcagcgcctactacatgtacctggacagaagcgacgccggcgaggccatcagctttccaaccaccctgggcatgaacaagtgctacatccagatcatggacctgggccacatgtgcgacgccaccatgagctacgagtgccccatgctggacgagggcgtggaacccgacgatgtggactgctggtgcaacaccaccagcacctgggtggtgtacggcacctgtcaccacaagaagggcgaagccagacggtccagacgggccgtgacactgcctagccacagcaccagaaagctgcagacccggtcccagacctggctggaaagcagagagtacaccaagcacctgatccgggtggaaaactggatcttccggaaccccggctttgccctggctgccgctgctattgcttggctgctgggcagcagcacctcccagaaagtgatctacctcgtgatgatcctgctgatcgcccctgcctacagcatccggtgtatcggcgtgtccaaccgggacttcgtggaaggcatgagcggcggcacatgggtggacgtggtgctggaacatggcggctgcgtgacagtgatggcccaggataagcccgccgtggacatcgagctcgtgaccaccaccgtgtccaatatggccgaagtgcggagctactgctacgaggccagcatcagcgacatggccagcgacagcagatgccctacacagggcgaggcctacctggataagcagtccgacacccagtacgtgtgcaagcggaccctggtggatagaggctggggcaatggctgcggcctgtttggcaagggcagcctcgtgacctgcgccaagttcgcctgcagcaagaagatgaccggcaagagcatccagcccgagaacctggaataccggatcatgctgagcgtgcacggctcccagcacagcggcatgatcgtggccgacaccggccacgagacagacgagaaccgggccaaggtggaaatcacccccaacagccctagagccgaggccacactgggcggctttggatctctgggcctggactgcgagcctagaaccggcctggatttcagcgacctgtactacctgaccatgaacaacaagcactggctggtgcacaaagagtggttccacgacatccccctgccctggcatgctggcgctgatacaggcaccccccactggaacaacaaagaggctctggtggaattcaaggacgcccacgccaagcggcagaccgtggtggtgctgggatctcaggaaggcgccgtgcatacagctctggctggcgccctggaagccgaaatggatggcgccaaaggcagactgtcctccggccacctgaagtgccggctgaagatggacaagctgcggctgaagggcgtgtcctacagcctgtgtaccgccgccttcaccttcaccaagatccccgccgagacactgcacggcaccgtgactgtggaagtgcagtacgccggcaccgacggcccttgtaaagtgcctgctcagatggccgtggatatgcagaccctgacccccgtgggcagactgatcaccgccaaccctgtgatcaccgagagcaccgagaacagcaagatgatgctggaactggacccccccttcggcgactcctacatcgtgatcggcgtgggagagaagaagatcacccaccactggcacagatccggcagcaccatcggcaaggcctttgaggctacagtgcggggagccaagagaatggccgtgctgggcgataccgcctgggattttggctctgtgggcggagccctgaacagcctgggaaagggcatccaccagatcttcggcgctgccttcaagagcctgttcggcggcatgagctggttcagccagatcctgatcggcaccctgctcgtgtggctgggcctgaacaccaagaacggcagcatctccctgacctgcctggctctgggcggcgtgctgatctttctgagcacagccgtgtccgcc

SEQ ID NO: 156 - protein, 794 aa, unidentified
  source 1..794: note = Zika Virus
MKNPKEEIRRIRIVNMLKRGVARVSPFGGLKRLPAGLLLGHGPIRMVLAILAFLRFTAIKPSLGLINRWGSVGKKEAMEIIKKFKKDLAAMLRIINARKEKKRRGTDTSVGIVGLLLTTAMAVEVTRRGSAYYMYLDRSDAGEAISFPTTLGMNKCYIQIMDLGHMCDATMSYECPMLDEGVEPDDVDCWCNTTSTWVVYGTCHHKKGEARRSRRAVTLPSHSTRKLQTRSQTWLESREYTKHLIRVENWIFRNPGFALAAAAIAWLLGSSTSQKVIYLVMILLIAPAYSIRCIGVSNRDFVEGMSGGTWVDVVLEHGGCVTVMAQDKPAVDIELVTTTVSNMAEVRSYCYEASISDMASDSRCPTQGEAYLDKQSDTQYVCKRTLVDRGWGNGCGLFGKGSLVTCAKFACSKKMTGKSIQPENLEYRIMLSVHGSQHSGMIVNDTGHETDENRAKVEITPNSPRAEATLGGFGSLGLDCEPRTGLDFSDLYYLTMNNKHWLVHKEWFHDIPLPWHAGADTGTPHWNNKEALVEFKDAHAKRQTVVVLGSQEGAVHTALAGALEAEMDGAKGRLSSGHLKCRLKMDKLRLKGVSYSLCTAAFTFTKIPAETLHGTVTVEVQYAGTDGPCKVPAQMAVDMQTLTPVGRLITANPVITESTENSKMMLELDPPFGDSYIVIGVGEKKITHHWHRSGSTIGKAFEATVRGAKRMAVLGDTAWDFGSVGGALNSLGKGIHQIFGAAFKSLFGGMSWFSQILIGTLLVWLGLNTKNGSISLTCLALGGVLIFLSTAVSA

SEQ ID NO: 157 - protein, 788 aa, unidentified
  source 1..788: note = Zika Virus
MKNPKKKSGGFRIVNMLKRGVARVNPLGGLKRLPAGLLLGHGPIRMVLAILAFLRFTAIKPSLGLINRWGTVGKKEAMEIIKKFKKDLAAMLRIINARKERKRRGADTSIGIVGLLLTTAMAAEITRRGSAYYMYLDRSDAGKAISFATTLGVNKCHVQIMDLGHMCDATMSYECPMLDEGVEPDDVDCWCNTTSTWVVYGTCHHKKGEARRSRRAVTLPSHSTRKLQTRSQTWLESREYTKHLIKVENWIFRNPGFTLVAVAIAWLLGSSTSQKVIYLVMILLIAPAYSIRCIGVSNRDFVEGMSGGTWVDVVLEHGGCVTVMAQDKPTVDIELVTTTVSNMAEVRSYCYEASISDMASDSRCPTQGEAYLDKQSDTQYVCKRTLVDRGWGNGCGLFGKGSLVTCAKFTCSKKMTGKSIQPENLEYRIMLSVHGSQHSGMIVNDENRAKVEVTPNSPRAEATLGGFGSLGLDCEPRTGLDFSDLYYLTMNNKHWLVHKEWFHDIPLPWHAGADTGTPHWNNKEALVEFKDAHAKRQTVVVLGSQEGAVHTALAGALEAEMDGAKGRLFSGHLKCRLKMDKLRLKGVSYSLCTAAFTFTKVPAETLHGTVTVEVQYAGTDGPCKVPAQMAVDMQTLTPVGRLITANPVITESTENSKMMLELDPPFGDSYIVIGVGDKKITHHWHRSGSTIGKAFEATVRGAKRMAVLGDTAWDFGSVGGVFNSLGKGIHQIFGAAFKSLFGGMSWFSQILIGTLLVWLGLNTKNGSISLTCLALGGVMIFLSTAVSA

SEQ ID NO: 158 - protein, 794 aa, unidentified
  source 1..794: note = Zika Virus
MKNPKRAGSSRLVNMLRRGAARVIPPGGGLKRLPVGLLLGRGPIKMILAILAFLRFTAIKPSTGLINRWGKVGKKEAIKILTKFKADVGTMLRIINNRKTKKRGVETGIVFLALLVSIVAVEVTKKGDTYYMFADKKDAGKVVTFETESGPNRCSIQAMDIGHMCPATMSYECPVLEPQYEPEDVDCWCNSTAAWIVYGTCTHKTTGETRRSRRSITLPSHASQKLETRSSTWLESREYSKYLIKVENWILRNPGYALVAAVIGWTLGSSRSQKIIFVTLLMLVAPAYSIRCIGIGNRDFIEGMSGGTWVDIVLEHGGCVTVMSNDKPTLDFELVTTTASNMAEVRSYCYEANISEMASDSRCPTQGEAYLDKMADSQFVCKRGYVDRGWGNGCGLFGKGSIVTCAKFTCVKKLTGKSIQPENLEYRVLVSVHASQHGGMINNDTNHQHDKENRARIDITASAPRVEVELGSFGSFSMECEPRSGLNFGDLYYLTMNNKHWLVNRDWFHDLSLPWHTGATSNNHHWNNKEALVEFREAHAKKQTAVVLGSQEGAVHAALAGALEAESDGHKATIYSGHLKCRLKLDKLRLKGMSYALCTGAFTFARTPSETIHGTATVELQYAGEDGPCKVPIVITSDTNSMASTGRLITANPVVTESGANSKMMVEIDPPFGDSYIIVGTGTTKITHHWHRAGSSIGRAFEATMRGAKRMAVLGDTAWDFGSVGGMFNSVGKFVHQVFGSAFKALFGGMSWFTQLLIGFLLIWMGLNARGGTVAMSFMGIGAMLIFLATSVSG

SEQ ID NO: 159 - protein, 790 aa, unidentified
  source 1..790: note = Zika Virus
MKNPKEEIRRIRIVNMLKRGVARVNPLGGLKRLPAGLLLGHGPIRMVLAILAFLRFTAIKPSLGLINRWGSVGKKEAMEIIKKFKKDLAAMLRIINARKERKRRGADTSIGIIGLLLTTAMAAEITRRGSAYYMYLDRSDAGKAISFATTLGVNKCHVQIMDLGHMCDATMSYECPMLDEGVEPDDVDCWCNTTSTWVVYGTCHHKKGEARRSRRAVTLPSHSTRKLQTRSQTWLESREYTKHLIKVENWIFRNPGFALVAVAIAWLLGSSTSQKVIYLVMILLIAPAYSIRCIGVSNRDFVEGMSGGTWVDVVLEHGGCVTVMAQDKPTVDIELVTTTVSNMAEVRSYCYEASISDMASDSRCPTQGEAYLDKQSDTQYVCKRTLVDRGWGNGCGLFGKGSLVTCAKFTCSKKMTGKSIQPENLEYRIMLSVHGSQHSGMIGYETDEDRAKVEVTPNSPRAEATLGGFGSLGLDCEPRTGLDFSDLYYLTMNNKHWLVHKEWFHDIPLPWHAGADTGTPHWNNKEALVEFKDAHAKRQTVVVLGSQEGAVHTALAGALEAEMDGAKGRLFSGHLKCRLKMDKLRLKGVSYSLCTAAFTFTKVPAETLHGTVTVEVQYAGTDGPCKIPVQMAVDMQTLTPVGRLITANPVITESTENSKMMLELDPPFGDSYIVIGVGDKKITHHWHRSGSTIGKAFEATVRGAKRMAVLGDTAWDFGSVGGVFNSLGKGIHQIFGAAFKSLFGGMSWFSQILIGTLLVWLGLNTKNGSISLTCLALGGVMIFLSTAVSA

SEQ ID NO: 160 - protein, 789 aa, unidentified
  source 1..789: note = Zika Virus
MKNPKEEIRRIRIVNMLKRGVARVNPLGGLKRLPAGLLLGHGPIRMVLAILAFLRFTAIKPSLGLINRWGSVGKKEAMEIIKKFKKDLAAMLRIINARKERKRRGADTSIGIIGLLLTTAMAAEITRRGSAYYMYLDRSDAGKAISFATTLGVNKCHVQIMDLGHMCDATMSYECPMLDEGVEPDDVDCWCNTTSTWVVYGTCHHKKGEARRSRRAVTLPSHSTRKLQTRSQTWLESREYTKHLIKVENWIFRNPGFALVAVAIAWLLGSSTSQKVIYLVMILLIAPAYSIRCIGVSNRDFVEGMSGGTWVDVVLEHGGCVTVMAQDKPTVDIELVTTTVSNMAEVRSYCYEASISDMASDSRCPTQGEAYLDKQSDTQYVCKRTLVDRGWGNGCGLFGKGSLVTCAKFTCKKMTGKSIQPENLEYRIMLSVHGSQHSGMIGYETDEDRAKVEVTPNSPRAEATLGGFGSLGLDCEPRTGLDFSDLYYLTMNNKHWLVHKEWFHDIPLPWHAGADTGTPHWNNKEALVEFKDAHAKRQTVVVLGSQEGAVHTALAGALEAEMDGAKGRLFSGHLKCRLKMDKLRLKGVSYSLCTAAFTFTKVPAETLHGTVTVEVQYAGTDGPCKIPVQMAVDMQTLTPVGRLITANPVITESTENSKMMLELDPPFGDSYIVIGVGDKKITHHWHRSGSTIGKAFEATVRGAKRMAVLGDTAWDFGSVGGVFNSLGKGIHQIFGAAFKSLFGGMSWFSQILIGTLLVWLGLNTKNGSISLTCLALGGVMIFLSTAVSA

SEQ ID NO: 161 - protein, 794 aa, unidentified
  source 1..794: note = Zika Virus
MKNPKKKSGGFRIVNMLKRGVARVNPLGGLKRLPAGLLLGHGPIRMVLAILAFLRFTAIKPSLGLINRWGSVGKKEAMEIIKKFKKDLAAMLRIINARKERKRRGADTSIGIIGLLLTTAMAAEITRRGSAYYMYLDRSDAGKAISFATNLGVNKCHVQIMDLGHMCDATMSYECPMLDEGVEPDDVDCWCNTTSTWVVYGTCHHKKGEARRSRRAVTLPSHSTRKLQTRSQTWLESREYTKHLIKVENWIFRNPGFALAAVAIAWLLGSSTSQKVIYLVMILLIAPAYSIRCIGVSNRDFVEGMSGGTWVDVVLEHGGCVTVMAQDKPTVDIELVTTTVSNMAEVRSYCYEASISDMASDSRCPTQGEAYLDKQSDTQYVCKRTLVDRGWGNGCGLFGKGSLVTCAKFTCSKKMTGKSIQPENLEYRIMLSVHGSQHSGMIVNDIGHETDENRAKVEVTPNSPRAEATLGGFGSLGLDCEPRTGLDFSDLYYLTMNNKHWLVHKEWFHDIPLPWHAGADTGTPHWNNKEALVEFKDAHAKRQTVVVLGSQEGAVHTALAGALEAEMDGAKGRLFSGHLKCRLKMDKLRLKGVSYSLCTAAFTFTKVPAETLHGTVTVEVQYAGTDGPCKVPAQMAVDMQTLTPVGRLITANPVITESTENSKMMLELDPPFGDSYIVIGVGDKKITHHWHRSGSTIGKAFEATVRGAKRMAVLGDTAWDFGSVGGVFNSLGKGVHQIFGAAFKSLFGGMSWFSQILIGTLLVWLGLNTKNGSISLTCLALGGVMIFLSTAVSA

SEQ ID NO: 162 - protein, 788 aa, unidentified
  source 1..788: note = Zika Virus
MKNPKKKSGGFRIVNMLKRGVARVNPLGGLKRLPAGLLLGHGPIRMVLAILAFLRFTAIKPSLGLINRWGSVGKKEAMEIIKKFKKDLAAMLRIINARKERKRRGADTSIGIIGLLLTTAMAAEITRRGSAYYMYLDRSDAGKAISFATNLGVNKCHVQIMDLGHMCDATMSYECPMLDEGVEPDDVDCWCNTTSTWVVYGTCHHKKGEARRSRRAVTLPSHSTRKLQTRSQTWLESREYTKHLIKVENWIFRNPGFALAAVAIAWLLGSSTSQKVIYLVMILLIAPAYSIRCIGVSNRDFVEGMSGGTWVDVVLEHGGCVTVMAQDKPTVDIELVTTTVSNMAEVRSYCYEASISDMASDSRCPTQGEAYLDKQSDTQYVCKRTLVDRGWGNGCGLFGKGSLVTCAKFTCSKKMTGKSIQPENLEYRIMLSVHGSQHSGMIVNDENRAKVEVTPNSPRAEATLGGFGSLGLDCEPRTGLDFSDLYYLTMNNKHWLVHKEWFHDIPLPWHAGADTGTPHWNNKEALVEFKDAHAKRQTVVVLGSQEGAVHTALAGALEAEMDGAKGRLFSGHLKCRLKMDKLRLKGVSYSLCTAAFTFTKVPAETLHGTVTVEVQYAGTDGPCKVPAQMAVDMQTLTPVGRLITANPVITESTENSKMMLELDPPFGDSYIVIGVGDKKITHHWHRSGSTIGKAFEATVRGAKRMAVLGDTAWDFGSVGGVFNSLGKGIHQIFGAAFKSLFGGMSWFSQILIGTLLVWLGLNTKNGSISLTCLALGGVMIFLSTAVSA

SEQ ID NO: 163 - protein, 794 aa, unidentified; identical to SEQ ID NO: 161
  source 1..794: note = Zika Virus

SEQ ID NO: 164 - protein, 794 aa, unidentified
  VARIANT 446..452: note = misc_feature - Xaa can be any naturally occurring amino acid
  source 1..794: note = Zika Virus
MKNPKKKSGGFRIVNMLKRGVARVNPLGGLKRLPAGLLLGHGPIRMVLAILAFLRFTAIKPSLGLINRWGSVGKKEAMEIIKKFKKDLAAMLRIINARKERKRRGADTSIGIIGLLLTTAMAAEITRRGSAYYMYLDRSDAGKAISFATTLGVNKCHVQIMDLGHMCDATMSYECPMLDEGVEPDDVDCWCNTTSTWVVYGTCHHKKGEARRSRRAVTLPSHSTRKLQTRSQTWLESREYTKHLIKVENWIFRNPGFALAAVAIAWLLGSSTSQKVIYLIMILLIAPAYSIRCIGVSNRDFVEGMSGGTWVDVVLEHGGCVTVMAQDKPTVDIELVTTTVSNMAEVRSYCYEASISDMASDSRCPTQGEAYLDKQSDTQYVCKRTLVDRGWGNGCGLFGKGSLVTCAKFTCSKKMTGKSIQPENLEYRIMLSVHGSQHSGMIVNDXXXXXXXNRAEVEVTPNSPRAEATLGGFGSLGLDCEPRTGLDFSDLYYLTMNNKHWLVHKEWFHDIPLPWHAGADTGTPHWNNKEALVEFKDAHAKRQTVVVLGSQEGAVHTALAGALEAEMDGAKGRLFSGHLKCRLKMDKLRLKGVSYSLCTAAFTFTKVPAETLHGTVTVEVQYAGTDGPCKVPAQMAVDMQTLTPVGRLITANPVITESTENSKMMLELDPPFGDSYIVIGVGDKKITHHWHRSGSTIGKAFEATVRGAKRMAVLGDTAWDFGSVGGVFNSLGKGIHQIFGAAFKSLFGGMSWFSQILIGTLLVWLGLNTKNGSISLTCLALGGVMIFLSTAVSA

SEQ ID NO: 165 - protein, 794 aa, unidentified
  source 1..794: note = Zika Virus
MKNPKKRSGGFRIVNMLKRGVARVNPLGGLKRLPAGLLLGHGPIRMVLAILAFLRFTAIKPSLGLINRWGSVGKKEAMEIIKKFKKDLAAMLRIINARKERKRRGADTSIGIVGLLLTTAMAAEITRRGSAYYMYLDRSDAGKAISFATTLGVNKCHVQIMDLGHMCDATMSYECPMLDEGVEPDDVDCWCNTTSTWVVYGTCQHKKGEARRSRRAVTLPSHSTRKLQTRSQTWLESREYTKHLIKVENWIFRNPGFALVAVAIAWLLGSSTSQKVIYLVMILLIAPAYSIRCIGVSNRDFVEGMSGGTWVDVVLEHGGCVTVMAQDKPTVDIELVTTTVSNMAEVRSYCYEASISDMASDSRCPTQGEAYLDKQSDTQYVCKRTLVDRGWGNGCGLFGKGSLVTCAKFTCSKKMTGKSIQPENLEYRIMLSVHGSQHSGMIVNDIGHETDENRAKVEVTPNSPRAEATLGGFGSLGLDCEPRTGLDFSDLYYLTMNNKHWLVHKEWFHDIPLPWHAGADTGTPHWNNKEALVEFKDAHAKRQTVVVLGSQEGAVHTALAGALEAEMDGAKGRLFSGHLKCRLKMDKLRLKGVSYSLCTAVCTAAKVPAETLHGTVTVEVQYAGTDGPCKVPAQMAVDMQTLTPVGRLITANPVITESTENSKMMLELDPPFGDSYIVIGVGDKKITHHWHRSGSTIGKAFEATVRGAKRMAVLGDTAWDFGSVGGVFNSLGKGIHQIFGAAFKSLFGGMSWFSQILIGTLLVWLGLNTKNGSISLTCLALGGVMIFLSTAVSA

SEQ ID NO: 166 - protein, 794 aa, unidentified
  source 1..794: note = Zika Virus
MKNPKKKSGRFRIVNMLKRGVARVNPLGGLKRLPAGLLLGHGPIRMVLAILAFLRFTAIKPSLGLINRWGSVGKKEAMEIIKKFKKDLAAMLRIINARKERKRRGADTSIGIIGLLLTTAMAAEITRRGSAYYMYLDRSDAGKAISFATTLGVNKCHVQIMDLGHMCDATMSYECPMLDEGVEPDDVDCWCNTTSTWVVYGTCHHKKGETRRSRRSVSLRYHYTRKLQTRSQTWLESREYKKHLIMVENWIFRNPGFAIVSVAITWLMGSLTSQKVIYLVMIVLIVPAYSISCIGVSNRDLVEGMSGGTWVDVVLEHGGCVTEMAQDKPTVDIELVTMTVSNMAEVRSYCYEASLSDMASASRCPTQGEPSLDKQSDTQSVCKRTLGDRGWGNGCGIFGKGSLVTCSKFTCCKKMPGKSIQPENLEYRIMLPVHGSQHSGMIVNDIGHETDENRAKVEVTPNSPRAEATLGGFGSLGLDCEPRTGLDFSDLYYLTMNNKHWLVHKEWFHDIPLPWHAGADTGTPHWNNKEALVEFKDAHAKRQTVVVLGSQEGAVHTALAGALEAEMDGAKGRLFSGHLKCRLKMDKLRLKGVSYSLCTAAFTFTKVPAETLHGTVTVEVQSAGTDGPCKVPAQMAVDMQTLTPVGRLITANPVITESTENSKMMLELDPPFGDSYIVIGVGDKKITHHWHRSGSTIGKAFEATVRGAKRMAVLGDTAWDFGSVGGVFNSLGKGIHQIFGAAFKSLFGGMSWFSQILIGTLLVWLGLNTKNGSISLTCLALGGVMIFLSTAVSA

SEQ ID NO: 167 - protein, 794 aa, unidentified
  VARIANT 442..446: note = misc_feature - Xaa can be any naturally occurring amino acid
  source 1..794: note = Zika Virus
MKNPKRKSGGFRIVNMLKRGVARVNPLGGLKRLPAGLLLGHGPIRMVLAILAFLRFTAIKPSLGLINRWGSVGKKEAMEIIKKFKKDLAAMLRIINARKERKRRGADTSIGIIGLLLTTAMAAEITRRGSAYYMYLDRSDAGKAISFATTLGVNKCHVQIMDLGHMCDATMSYECPMLDEGVEPDDVDCWCNTTSTWVVYGTCHHKKGEARRSRRAVTLPSHSTRKLQTRSQTWLESREYTKHLIKVENWIFRNPGFALAAVAIAWLLGSSTSQKVIYLVMILLIAPAYSIRCIGVSNRDFVEGMSGGTWVDVVLEHGGCVTVMAQDKPTVDIELVTTTVSNMAEVRSYCYEASISDMASDSRCPTQGEAYLDKQSDTQYVCKRTLVDRGWGNGCGLFGKGSLVTCAKFTCSKKMTGKSIQPENLEYRIMLSVHGSQHSGMXXXXXGHETDENRAKVEVTPNSPRAEATLGGFGSLGLDCEPRTGLDFSDLYYLTMNNKHRLVRKEWFHDIPLPWHAGADTGTPHWNNKEALVEFKDAHAKRQTVVVLGSQEGAVHTALAGALEAEMDGAKGRLFSGHLKCRLKMDKLRLKGVSYSLCTAAFTFTKVPAETLHGTVTVEVQYAGTDGPCKVPAQMAVDMQTLTPVGRLITANPVITESTENSKMMLELDPPFGDSYIVIGVGDKKITHHWLKKGSSIGKAFEATVRGAKRMAVLGDTAWDFGSVGGVFNSLGKGVHQIFGAAFKSLFGGMSWFSQILIGTLLVWLGLNTKNGSISLTCLALGGVMIFLSTAVSA

SEQ ID NO: 168 - protein, 794 aa, unidentified
  source 1..794: note = Zika Virus
MKNPKKKSGGFRIVNMLKRGVARVNPLGGLKRLPAGLLLGHGPIRMVLAILAFLRFTAIKPSLGLINRWGSVGKKEAMEIIKKFKKDLAAMLRIINARKERKRRGADTSIGIIGLLLTTAMAAEITRRGSAYYMYLDRSDAGKAISFATTLGVNKCHVQIMDLGHMCDATMSYECPMLDEGVEPDDVDCWCNTTSTWVVYGTCHHKKGEARRSRRAVTLPSHSTRKLQTRSQTWLESREYTKHLIKVENWIFRNPGFALVAVAIAWLLGSSTSQKVIYLVMILLIAPAYSIRCIGVSNRDFVEGMSGGTWVDVVLEHGGCVTVMAQDKPTVDIELVTTTVSNMAEVRSYCYEASISDMASDSRCPTQGEAYLDKQSDTQYVCKRTLVDRGWGNGCGLFGKGSLVTCAKFTCSKKMTGKSIQPENLEYRIMLSVHGSQHSGMIVNDIGHETDENRAKVEVTPNSPRAEATLGGFGSLGLDCEPRTGLDFSDLYYLTMNNKHWLVHKEWFHDIPLPWHAGADTGTPHWNNKEALVEFKDAHAKRQTVVVLGSQEGAVHTALAGALEAEMDGAKGRLFSGHLKCRLKMDKLRLKGVSYSLCTAAFTFTKVPAETLHGTVTVEVQYAGTDGPCKVPAQMAVDMQTLTPVGRLITANPVITESTENSKMMLELDPPFGDSYIVIGVGDKKITHHWHRSGSTIGKAFEATVRGAKRMAVLGDTAWDFGSVGGVFNSLGKGIHQIFGAAFKSLFGGMSWFSQILIGTLLVWLGLNTKNGSISLTCLALGGVMIFLSTAVSA

SEQ ID NO: 169 - protein, 794 aa, unidentified
  source 1..794: note = Zika Virus
MKNPKKKSGGFRIVNMLKRGVARVSPFGGLKRLPAGLLLGHGPIRMVLAILAFLRFTAIKPSLGLINRWGSVGKKEAMEIIKKFKKDLAAMLRIINARKEKKRRGADTSVGIVGLLLTTAMAAEVTRRGSAYYMYLDRNDAGEAISFPTTLGMNKCYIQIMDLGHMCDATMSYECPMLDEGVEPDDVDCWCNTTSTWVVYGTCHHKKGEARRSRRAVTLPSHSTRKLQTRSQTWLESREYTKHLIRVENWIFRNPGFALAAAAIAWLLGSSTSQKVIYLVMILLIAPAYSIRCIGVSNRDFVEGMSGGTWVDVVLEHGGCVTVMAQDKPTVDIELVTTTVSNMAEVRSYCYEASISDMASDSRCPTQGEAYLDKQSDTQYVCKRTLVDRGWGNGCGLFGKGSLVTCAKFACSKKMTGKSIQPENLEYRIMLSVHGSQHSGMIVNDTGHETDENRAKVEITPNSPRAEATLGGFGSLGLDCEPRTGLDFSDLYYLTMNNKHWLVHKEWFHDIPLPWHAGADTGTPHWNNKEALVEFKDAHAKRQTVVVLGSQEGAVHTALAGALEAEMDGAKGRLSSGHLKCRLKMDKLRLKGVSYSLCTAAFTFTKIPAETLHGTVTVEVQYAGTDGPCKVPAQMAVDMQTLTPVGRLITANPVITESTENSKMMLELDPPFGDSYIVIGVGEKKITHHWHRSGSTIGKAFEATVRGAKRMAVLGDTAWDFGSVGGALNSLGKGIHQIFGAAFKSLFGGMSWFSQILIGTLLMWLGLNTKNGSISLMCLALGGVLIFLSTAVSA

SEQ ID NO: 170 - protein, 794 aa, unidentified
  source 1..794: note = Zika Virus
MKNPKKKSGGFRIVNMLKRGVARVNPLGGLKRLPAGLLLGHGPIRMVLAILAFLRFTAIKPSLGLINRWGSVGKKEAMEIIKKFKKDLAAMLRIINARKERKRRGADTSIGIIGLLLTTAMAAEITRRGSAYYMYLDRSDAGKAISFATTLGVNKCHVQIMDLGHMCDATMSYECPMLDEGVEPDDVDCWCNTTSTWVVYGTCHHKKGEARRSRRAVTLPSHSTRKLQTRSQTWLESREYTKHLIKVENWIFRNPGFALVAVAIAWLLGSSTSQKVIYLVMILLIAPAYSIRCIGVSNRDFVEGMSGGTWVDVVLEHGGCVTVMAQDKPTVDIELVTTTVSNMAEVRSYCYEASISDMASDSRCPTQGEAYLDKQSDTQYVCKRTLVDRGWGNGCGLFGKGSLVTCAKFTCSKKMTGKSIQPENLEYRIMLSVHGSQHSGMTVNDIGYETDENRAKVEVTPNSPRAEATLGGFGSLGLDCEPRTGLDFSDLYYLTMNNKHWLVHKEWFHDIPLPWHAGADTGTPHWNNKEALVEFKDAHAKRQTVVVLGSQEGAVHTALAGALEAEMDGAKGKLFSGHLKCRLKMDKLRLKGVSYSLCTAAFTFTKVPAETLHGTVTVEVQYAGTDGPCKIPVQMAVDMQTLTPVGRLITANPVITESTENSKMMLELDPPFGDSYIVIGVGDKKITHHWHRSGSTIGKAFEATVRGAKRMAVLGDTAWDFGSVGGVFNSLGKGIHQIFGAAFKSLFGGMSWFSQILIGTLLVWLGLNTKNGSISLTCLALGGVMIFLSTAVSA

SEQ ID NO: 171 - protein, 674 aa, unidentified
  source 1..674: note = Zika Virus
VEVTKKGDTYYMFADKKDAGKVVTFETESGPNRCSIQAMDIGHMCPATMSYECPVLEPQYEPEDVDCWCNSTAAWIVYGTCTHKTTGETRRSRRSITLPSHASQKLETRSSTWLESREYSKYLIKVENWILRNPGYALVAAVIGWTLGSSRSQKIIFVTLLMLVAPAYSIRCIGIGNRDFIEGMSGGTWVDIVLEHGGCVTVMSNDKPTLDFELVTTTASNMAEVRSYCYEANISEMASDSRCPTQGEAYLDKMADSQFVCKRGYVDRGWGNGCGLFGKGSIVTCAKFTCVKKLTGKSIQPENLEYRVLVSVHASQHGGMINNDTNHQHDKENRARIDITASAPRVEVELGSFGSFSMECEPRSGLNFGDLYYLTMNNKHWLVNRDWFHDLSLPWHTGATSNNHHWNNKEALVEFREAHAKKQTAVVLGSQEGAVHAALAGALEAESDGHKATIYSGHLKCRLKLDKLRLKGMSYALCTGAFTFARTPSETIHGTATVELQYAGEDGPCKVPIVITSDTNSMASTGRLITANPVVTESGANSKMMVEIDPPFGDSYIIVGTGTTKITHHWHRAGSSIGRAFEATMRGAKRMAVLGDTAWDFGSVGGMFNSVGKFVHQVFGSAFKALFGGMSWFTQLLIGFLLIWMGLNARGGTVAMSFMGIGAMLIFLATSVSG

SEQ ID NO: 172 - protein, 668 aa, unidentified
  source 1..668: note = Zika Virus
AEITRRGSAYYMYLDRSDAGKAISFATTLGVNKCHVQIMDLGHMCDATMSYECPMLDEGVEPDDVDCWCNTTSTWVVYGTCHHKKGEARRSRRAVTLPSHSTRKLQTRSQTWLESREYTKHLIKVENWIFRNPGFALVAVAIAWLLGSSTSQKVIYLVMILLIAPAYSIRCIGVSNRDFVEGMSGGTWVDVVLEHGGCVTVMAQDKPTVDIELVTTTVSNMAEVRSYCYEASISDMASDSRCPTQGEAYLDKQSDTQYVCKRTLVDRGWGNGCGLFGKGSLVTCAKFTCSKKMTGKSIQPENLEYRIMLSVHGSQHSGMIGYETDEDRAKVEVTPNSPRAEATLGGFGSLGLDCEPRTGLDFSDLYYLTMNNKHWLVHKEWFHDIPLPWHAGADTGTPHWNNKEALVEFKDAHAKRQTVVVLGSQEGAVHTALAGALEAEMDGAKGRLFSGHLKCRLKMDKLRLKGVSYSLCTAAFTFTKVPAETLHGTVTVEVQYAGTDGPCKIPVQMAVDMQTLTPVGRLITANPVITESTENSKMMLELDPPFGDSYIVIGVGDKKITHHWHRSGSTIGKAFEATVRGAKRMAVLGDTAWDFGSVGGVFNSLGKGIHQIFGAAFKSLFGGMSWFSQILIGTLLVWLGLNTKNGSISLTCLALGGVMIFLSTAVSA

SEQ ID NO: 173 - protein, 672 aa, unidentified
  source 1..672: note = Zika Virus
AEVTRRGSAYYMYLDRNDAGEAISFPTTLGMNKCYIQIMDLGHMCDATMSYECPMLDEGVEPDDVDCWCNTTSTWVVYGTCHHKKGEARRSRRAVTLPSHSTRKLQTRSQTWLESREYTKHLIRVENWIFRNPGFALAAAAIAWLLGSSTSQKVIYLVMILLIAPAYSIRCIGVSNRDFVEGMSGGTWVDVVLEHGGCVTVMAQDKPTVDIELVTTTVSNMAEVRSYCYEASISDMASDSRCPTQGEAYLDKQSDTQYVCKRTLVDRGWGNGCGLFGKGSLVTCAKFACSKKMTGKSIQPENLEYRIMLSVHGSQHSGMIVNDTGHETDENRAKVEITPNSPRAEATLGGFGSLGLDCEPRTGLDFSDLYYLTMNNKHWLVHKEWFHDIPLPWHAGADTGTPHWNNKEALVEFKDAHAKRQTVVVLGSQEGAVHTALAGALEAEMDGAKGRLSSGHLKCRLKMDKLRLKGVSYSLCTAAFTFTKIPAETLHGTVTVEVQYAGTDGPCKVPAQMAVDMQTLTPVGRLITANPVITESTENSKMMLELDPPFGDSYIVIGVGEKKITHHWHRSGSTIGKAFEATVRGAKRMAVLGDTAWDFGSVGGALNSLGKGIHQIFGAAFKSLFGGMSWFSQILIGTLLMWLGLNTKNGSISLMCLALGGVLIFLSTAVSA

SEQ ID NO: 174 - protein, 672 aa, unidentified
  source 1..672: note = Zika Virus
AEITRRGSAYYMYLDRSDAGKAISFATTLGVNKCHVQIMDLGHMCDATMSYECPMLDEGVEPDDVDCWCNTTSTWVVYGTCHHKKGEARRSRRAVTLPSHSTRKLQTRSQTWLESREYTKHLIKVENWIFRNPGFALVAVAIAWLLGSSTSQKVIYLVMILLIAPAYSIRCIGVSNRDFVEGMSGGTWVDVVLEHGGCVTVMAQDKPTVDIELVTTTVSNMAEVRSYCYEASISDMASDSRCPTQGEAYLDKQSDTQYVCKRTLVDRGWGNGCGLFGKGSLVTCAKFTCSKKMTGKSIQPENLEYRIMLSVHGSQHSGMIVNDIGHETDENRAKVEVTPNSPRAEATLGGFGSLGLDCEPRTGLDFSDLYYLTMNNKHWLVHKEWFHDIPLPWHAGADTGTPHWNNKEALVEFKDAHAKRQTVVVLGSQEGAVHTALAGALEAEMDGAKGRLFSGHLKCRLKMDKLRLKGVSYSLCTAAFTFTKVPAETLHGTVTVEVQYAGTDGPCKVPAQMAVDMQTLTPVGRLITANPVITESTENSKMMLELDPPFGDSYIVIGVGDKKITHHWHRSGSTIGKAFEATVRGAKRMAVLGDTAWDFGSVGGVFNSLGKGIHQIFGAAFKSLFGGMSWFSQILIGTLLVWLGLNTKNGSISLTCLALGGVMIFLSTAVSA

SEQ ID NO: 175 - protein, 672 aa, unidentified
  source 1..672: note = Zika Virus
AEITRRGSAYYMYLDRSDAGKAISFATTLGVNKCHVQIMDLGHMCDATMSYECPMLDEGVEPDDVDCWCNTTSTWVVYGTCHHKKGETRRSRRSVSLRYHYTRKLQTRSQTWLESREYKKHLIMVENWIFRNPGFAIVSVAITWLMGSLTSQKVIYLVMIVLIVPAYSISCIGVSNRDLVEGMSGGTWVDVVLEHGGCVTEMAQDKPTVDIELVTMTVSNMAEVRSYCYEASLSDMASASRCPTQGEPSLDKQSDTQSVCKRTLGDRGWGNGCGIFGKGSLVTCSKFTCCKKMPGKSIQPENLEYRIMLPVHGSQHSGMIVNDIGHETDENRAKVEVTPNSPRAEATLGGFGSLGLDCEPRTGLDFSDLYYLTMNNKHWLVHKEWFHDIPLPWHAGADTGTPHWNNKEALVEFKDAHAKRQTVVVLGSQEGAVHTALAGALEAEMDGAKGRLFSGHLKCRLKMDKLRLKGVSYSLCTAAFTFTKVPAETLHGTVTVEVQSAGTDGPCKVPAQMAVDMQTLTPVGRLITANPVITESTENSKMMLELDPPFGDSYIVIGVGDKKITHHWHRSGSTIGKAFEATVRGAKRMAVLGDTAWDFGSVGGVFNSLGKGIHQIFGAAFKSLFGGMSWFSQILIGTLLVWLGLNTKNGSISLTCLALGGVMIFLSTAVSA

SEQ ID NO: 176 - protein, 673 aa, unidentified
  VARIANT 321..325: note = misc_feature - Xaa can be any naturally occurring amino acid
  source 1..673: note = Zika Virus
AAEITRRGSAYYMYLDRSDAGKAISFATTLGVNKCHVQIMDLGHMCDATMSYECPMLDEGVEPDDVDCWCNTTSTWVVYGTCHHKKGEARRSRRAVTLPSHSTRKLQTRSQTWLESREYTKHLIKVENWIFRNPGFALAAVAIAWLLGSSTSQKVIYLVMILLIAPAYSIRCIGVSNRDFVEGMSGGTWVDVVLEHGGCVTVMAQDKPTVDIELVTTTVSNMAEVRSYCYEASISDMASDSRCPTQGEAYLDKQSDTQYVCKRTLVDRGWGNGCGLFGKGSLVTCAKFTCSKKMTGKSIQPENLEYRIMLSVHGSQHSGMXXXXXGHETDENRAKVEVTPNSPRAEATLGGFGSLGLDCEPRTGLDFSDLYYLTMNNKHRLVRKEWFHDIPLPWHAGADTGTPHWNNKEALVEFKDAHAKRQTVVVLGSQEGAVHTALAGALEAEMDGAKGRLFSGHLKCRLKMDKLRLKGVSYSLCTAAFTFTKVPAETLHGTVTVEVQYAGTDGPCKVPAQMAVDMQTLTPVGRLITANPVITESTENSKMMLELDPPFGDSYIVIGVGDKKITHHWLKKGSSIGKAFEATVRGAKRMAVLGDTAWDFGSVGGVFNSLGKGVHQIFGAAFKSLFGGMSWFSQILIGTLLVWLGLNTKNGSISLTCLALGGVMIFLSTAVSA

SEQ ID NO: 177 - protein, 672 aa, unidentified
  source 1..672: note = Zika Virus
AEITRRGSAYYMYLDRSDAGKAISFATTLGVNKCHVQIMDLGHMCDATMSYECPMLDEGVEPDDVDCWCNTTSTWVVYGTCQHKKGEARRSRRAVTLPSHSTRKLQTRSQTWLESREYTKHLIKVENWIFRNPGFALVAVAIAWLLGSSTSQKVIYLVMILLIAPAYSIRCIGVSNRDFVEGMSGGTWVDVVLEHGGCVTVMAQDKPTVDIELVTTTVSNMAEVRSYCYEASISDMASDSRCPTQGEAYLDKQSDTQYVCKRTLVDRGWGNGCGLFGKGSLVTCAKFTCSKKMTGKSIQPENLEYRIMLSVHGSQHSGMIVNDIGHETDENRAKVEVTPNSPRAEATLGGFGSLGLDCEPRTGLDFSDLYYLTMNNKHWLVHKEWFHDIPLPWHAGADTGTPHWNNKEALVEFKDAHAKRQTVVVLGSQEGAVHTALAGALEAEMDGAKGRLFSGHLKCRLKMDKLRLKGVSYSLCTAVCTAAKVPAETLHGTVTVEVQYAGTDGPCKVPAQMAVDMQTLTPVGRLITANPVITESTENSKMMLELDPPFGDSYIVIGVGDKKITHHWHRSGSTIGKAFEATVRGAKRMAVLGDTAWDFGSVGGVFNSLGKGIHQIFGAAFKSLFGGMSWFSQILIGTLLVWLGLNTKNGSISLTCLALGGVMIFLSTAVSA

SEQ ID NO: 178 - protein, 672 aa, unidentified
  VARIANT 324..330: note = misc_feature - Xaa can be any naturally occurring amino acid
  source 1..672: note = Zika Virus
AEITRRGSAYYMYLDRSDAGKAISFATTLGVNKCHVQIMDLGHMCDATMSYECPMLDEGVEPDDVDCWCNTTSTWVVYGTCHHKKGEARRSRRAVTLPSHSTRKLQTRSQTWLESREYTKHLIKVENWIFRNPGFALAAVAIAWLLGSSTSQKVIYLIMILLIAPAYSIRCIGVSNRDFVEGMSGGTWVDVVLEHGGCVTVMAQDKPTVDIELVTTTVSNMAEVRSYCYEASISDMASDSRCPTQGEAYLDKQSDTQYVCKRTLVDRGWGNGCGLFGKGSLVTCAKFTCSKKMTGKSIQPENLEYRIMLSVHGSQHSGMIVNDXXXXXXXNRAEVEVTPNSPRAEATLGGFGSLGLDCEPRTGLDFSDLYYLTMNNKHWLVHKEWFHDIPLPWHAGADTGTPHWNNKEALVEFKDAHAKRQTVVVLGSQEGAVHTALAGALEAEMDGAKGRLFSGHLKCRLKMDKLRLKGVSYSLCTAAFTFTKVPAETLHGTVTVEVQYAGTDGPCKVPAQMAVDMQTLTPVGRLITANPVITESTENSKMMLELDPPFGDSYIVIGVGDKKITHHWHRSGSTIGKAFEATVRGAKRMAVLGDTAWDFGSVGGVFNSLGKGIHQIFGAAFKSLFGGMSWFSQILIGTLLVWLGLNTKNGSISLTCLALGGVMIFLSTAVSA

SEQ ID NO: 179 - protein, 672 aa, unidentified
  source 1..672: note = Zika Virus
AEITRRGSAYYMYLDRSDAGKAISFATNLGVNKCHVQIMDLGHMCDATMSYECPMLDEGVEPDDVDCWCNTTSTWVVYGTCHHKKGEARRSRRAVTLPSHSTRKLQTRSQTWLESREYTKHLIKVENWIFRNPGFALAAVAIAWLLGSSTSQKVIYLVMILLIAPAYSIRCIGVSNRDFVEGMSGGTWVDVVLEHGGCVTVMAQDKPTVDIELVTTTVSNMAEVRSYCYEASISDMASDSRCPTQGEAYLDKQSDTQYVCKRTLVDRGWGNGCGLFGKGSLVTCAKFTCSKKMTGKSIQPENLEYRIMLSVHGSQHSGMIVNDIGHETDENRAKVEVTPNSPRAEATLGGFGSLGLDCEPRTGLDFSDLYYLTMNNKHWLVHKEWFHDIPLPWHAGADTGTPHWNNKEALVEFKDAHAKRQTVVVLGSQEGAVHTALAGALEAEMDGAKGRLFSGHLKCRLKMDKLRLKGVSYSLCTAAFTFTKVPAETLHGTVTVEVQYAGTDGPCKVPAQMAVDMQTLTPVGRLITANPVITESTENSKMMLELDPPFGDSYIVIGVGDKKITHHWHRSGSTIGKAFEATVRGAKRMAVLGDTAWDFGSVGGVFNSLGKGVHQIFGAAFKSLFGGMSWFSQILIGTLLVWLGLNTKNGSISLTCLALGGVMIFLSTAVSA

SEQ ID NO: 180 - protein, 666 aa, unidentified
  source 1..666: note = Zika Virus
AEITRRGSAYYMYLDRSDAGKAISFATNLGVNKCHVQIMDLGHMCDATMSYECPMLDEGVEPDDVDCWCNTTSTWVVYGTCHHKKGEARRSRRAVTLPSHSTRKLQTRSQTWLESREYTKHLIKVENWIFRNPGFALAAVAIAWLLGSSTSQKVIYLVMILLIAPAYSIRCIGVSNRDFVEGMSGGTWVDVVLEHGGCVTVMAQDKPTVDIELVTTTVSNMAEVRSYCYEASISDMASDSRCPTQGEAYLDKQSDTQYVCKRTLVDRGWGNGCGLFGKGSLVTCAKFTCSKKMTGKSIQPENLEYRIMLSVHGSQHSGMIVNDENRAKVEVTPNSPRAEATLGGFGSLGLDCEPRTGLDFSDLYYLTMNNKHWLVHKEWFHDIPLPWHAGADTGTPHWNNKEALVEFKDAHAKRQTVVVLGSQEGAVHTALAGALEAEMDGAKGRLFSGHLKCRLKMDKLRLKGVSYSLCTAAFTFTKVPAETLHGTVTVEVQYAGTDGPCKVPAQMAVDMQTLTPVGRLITANPVITESTENSKMMLELDPPFGDSYIVIGVGDKKITHHWHRSGSTIGKAFEATVRGAKRMAVLGDTAWDFGSVGGVFNSLGKGIHQIFGAAFKSLFGGMSWFSQILIGTLLVWLGLNTKNGSISLTCLALGGVMIFLSTAVSA

SEQ ID NO: 181 - protein, 672 aa, unidentified; identical to SEQ ID NO: 179
  source 1..672: note = Zika Virus

SEQ ID NO: 182 - protein, 672 aa, unidentified
  source 1..672: note = Zika Virus
VEVTRRGSAYYMYLDRSDAGEAISFPTTLGMNKCYIQIMDLGHMCDATMSYECPMLDEGVEPDDVDCWCNTTSTWVVYGTCHHKKGEARRSRRAVTLPSHSTRKLQTRSQTWLESREYTKHLIRVENWIFRNPGFALAAAAIAWLLGSSTSQKVIYLVMILLIAPAYSIRCIGVSNRDFVEGMSGGTWVDVVLEHGGCVTVMAQDKPAVDIELVTTTVSNMAEVRSYCYEASISDMASDSRCPTQGEAYLDKQSDTQYVCKRTLVDRGWGNGCGLFGKGSLVTCAKFACSKKMTGKSIQPENLEYRIMLSVHGSQHSGMIVNDTGHETDENRAKVEITPNSPRAEATLGGFGSLGLDCEPRTGLDFSDLYYLTMNNKHWLVHKEWFHDIPLPWHAGADTGTPHWNNKEALVEFKDAHAKRQTVVVLGSQEGAVHTALAGALEAEMDGAKGRLSSGHLKCRLKMDKLRLKGVSYSLCTAAFTFTKIPAETLHGTVTVEVQYAGTDGPCKVPAQMAVDMQTLTPVGRLITANPVITESTENSKMMLELDPPFGDSYIVIGVGEKKITHHWHRSGSTIGKAFEATVRGAKRMAVLGDTAWDFGSVGGALNSLGKGIHQIFGAAFKSLFGGMSWFSQILIGTLLVWLGLNTKNGSISLTCLALGGVLIFLSTAVSA

SEQ ID NO: 183 - protein, 666 aa, unidentified
  source 1..666: note = Zika Virus
AEITRRGSAYYMYLDRSDAGKAISFATTLGVNKCHVQIMDLGHMCDATMSYECPMLDEGVEPDDVDCWCNTTSTWVVYGTCHHKKGEARRSRRAVTLPSHSTRKLQTRSQTWLESREYTKHLIKVENWIFRNPGFTLVAVAIAWLLGSSTSQKVIYLVMILLIAPAYSIRCIGVSNRDFVEGMSGGTWVDVVLEHGGCVTVMAQDKPTVDIELVTTTVSNMAEVRSYCYEASISDMASDSRCPTQGEAYLDKQSDTQYVCKRTLVDRGWGNGCGLFGKGSLVTCAKFTCSKKMTGKSIQPENLEYRIMLSVHGSQHSGMIVNDENRAKVEVTPNSPRAEATLGGFGSLGLDCEPRTGLDFSDLYYLTMNNKHWLVHKEWFHDIPLPWHAGADTGTPHWNNKEALVEFKDAHAKRQTVVVLGSQEGAVHTALAGALEAEMDGAKGRLFSGHLKCRLKMDKLRLKGVSYSLCTAAFTFTKVPAETLHGTVTVEVQYAGTDGPCKVPAQMAVDMQTLTPVGRLITANPVITESTENSKMMLELDPPFGDSYIVIGVGDKKITHHWHRSGSTIGKAFEATVRGAKRMAVLGDTAWDFGSVGGVFNSLGKGIHQIFGAAFKSLFGGMSWFSQILIGTLLVWLGLNTKNGSISLTCLALGGVMIFLSTAVSA

SEQ ID NO: 184 - protein, 668 aa, unidentified; identical to SEQ ID NO: 172
  source 1..668: note = Zika Virus

SEQ ID NO: 185 - protein, 672 aa, unidentified
  source 1..672: note = Zika Virus
AEITRRGSAYYMYLDRSDAGKAISFATTLGVNKCHVQIMDLGHMCDATMSYECPMLDEGVEPDDVDCWCNTTSTWVVYGTCHHKKGEARRSRRAVTLPSHSTRKLQTRSQTWLESREYTKHLIKVENWIFRNPGFALVAVAIAWLLGSSTSQKVIYLVMILLIAPAYSIRCIGVSNRDFVEGMSGGTWVDVVLEHGGCVTVMAQDKPTVDIELVTTTVSNMAEVRSYCYEASISDMASDSRCPTQGEAYLDKQSDTQYVCKRTLVDRGWGNGCGLFGKGSLVTCAKFTCSKKMTGKSIQPENLEYRIMLSVHGSQHSGMTVNDIGYETDENRAKVEVTPNSPRAEATLGGFGSLGLDCEPRTGLDFSDLYYLTMNNKHWLVHKEWFHDIPLPWHAGADTGTPHWNNKEALVEFKDAHAKRQTVVVLGSQEGAVHTALAGALEAEMDGAKGKLFSGHLKCRLKMDKLRLKGVSYSLCTAAFTFTKVPAETLHGTVTVEVQYAGTDGPCKIPVQMAVDMQTLTPVGRLITANPVITESTENSKMMLELDPPFGDSYIVIGVGDKKITHHWHRSGSTIGKAFEATVRGAKRMAVLGDTAWDFGSVGGVFNSLGKGIHQIFGAAFKSLFGGMSWFSQILIGTLLVWLGLNTKNGSISLTCLALGGVMIFLSTAVSA

SEQ ID NO: 186 - protein, 672 aa, unidentified; identical to SEQ ID NO: 173
  source 1..672: note = Zika Virus

SEQ ID NO: 187 - protein, 672 aa, unidentified; identical to SEQ ID NO: 173
  source 1..672: note = Zika Virus

SEQ ID NO: 188 - protein, 672 aa, unidentified; identical to SEQ ID NO: 173
  source 1..672: note = Zika Virus

SEQ ID NO: 189 - protein, 672 aa, unidentified; identical to SEQ ID NO: 173
  source 1..672: note = Zika Virus

SEQ ID NO: 190 - protein, 672 aa, unidentified
  source 1..672: note = Zika Virus
AEVTRRGSAYYMYLDRNDAGEAISFPTTLGMNKCYIQIMDLGHMCDATMSYECPMLDEGVEPDDVDCWCNTTSTWVVYGTCHHKKGEARRSRRAVTLPSHSTRKLQTRSQTWLESREYTKHLIRVENWIFRNPGFALAAAAIAWLLGSSTSQKVIYLVMILLIAPAYSIRCIGVSNRDFVEGMSGGTWVDIVLEHGGCVTVMAQDKPTVDIELVTTTVSNMAEVRSYCYEASISDMASDSRCPTQGEAYLDKQSDTQYVCKRTLVDRGWGNGCGLFGKGSLVTCAKFACSKKMTGKSIQPENLEYRIMLSVHGSQHSGMIVNDTGHETDENRAKVEITPNSPRAEATLGGFGSLGLDCEPRTGLDFSDLYYLTMNNKHWLVHKEWFHDIPLPWHAGADTGTPHWNNKEALVEFKDAHAKRQTVVVLGSQEGAVHTALAGALEAEMDGAKGRLSSGHLKCRLKMDKLRLKGVSYSLCTAAFTFTKIPAETLHGTVTVEVQYAGTDGPCKVPAQMAVDMQTLTPVGRLITANPVITESTENSKMMLELDPPFGDSYIVIGVGEKKITHHWHRSGSTIGKAFEATVRGAKRMAVLGDTAWDFGSVGGALNSLGKGIHQIFGAAFKSLFGGMSWFSQILIGTLLMWLGLNTKNGSISLMCLALGGVLIFLSTAVSA

SEQ ID NO: 191 - protein, 672 aa, unidentified
  source 1..672: note = Zika Virus
AEVTRRGSAYYMYLDRNDAGEAISFPTTLGMNKCYIQIMDLGHTCDATMSYECPMLDEGVEPDDVDCWCNTTSTWVVYGTCHHKKGEARRSRRAVTLPSHSTRKLQTRSQTWLESREYTKHLIRVENWIFRNPGFALAAAAIAWLLGSSTSQKVIYLVMILLIAPAYSIRCIGVSNRDFVEGMSGGTWVDVVLEHGGCVTVMAQDKPTVDIELVTTTVSNMAEVRSYCYEASISDMASDSRCPTQGEAYLDKQSDTQYVCKRTLVDRGWGNGCGLFGKGSLVTCAKFACSKKMTGKSIQPENLEYRIMLSVHGSQHSGMIVNDTGHETDENRAKVEITPNSPRAEATLGGFGSLGLDCEPRTGLDFSDLYYLTMNNKHWLVHKEWFHDIPLPWHAGADTGTPHWNNKEALVEFKDAHAKRQTVVVLGSQEGAVHTALAGALEAEMDGAKGRLSSGHLKCRLKMDKLRLKGVSYSLCTAAFTFTKIPAETLHGTVTVEVQYAGTDGPCKVPAQMAVDMQTLTPVGRLITANPVITESTENSKMMLELDPPFGDSYIVIGVGEKKITHHWHRSGSTIGKAFEATVRGAKRMAVLGDTAWDFGSVGGALNSLGKGIHQIFGAAFKSLFGGMSWFSQILIGTLLMWLGLNAKNGSISLMCLALGGVLIFLSTAVSA

SEQ ID NO: 192 - protein, 504 aa, unidentified
  source 1..504: note = Zika Virus
IRCIGVSNRDFVEGMSGGTWVDIVLEHGGCVTVMAQDKPTVDIELVTTTVSNMAEVRSYCYEASISDMASDSRCPTQGEAYLDKQSDTQYVCKRTLVDRGWGNGCGLFGKGSLVTCAKFACSKKMTGKSIQPENLEYRIMLSVHGSQHSGMIVNDTGHETDENRAKVEITPNSPRAEATLGGFGSLGLDCEPRTGLDFSDLYYLTMNNKHWLVHKEWFHDIPLPWHAGADTGTPHWNNKEALVEFKDAHAKRQTVVVLGSQEGAVHTALAGALEAEMDGAKGRLSSGHLKCRLKMDKLRLKGVSYSLCTAAFTFTKIPAETLHGTVTVEVQYAGTDGPCKVPAQMAVDMQTLTPVGRLITANPVITESTENSKMMLELDPPFGDSYIVIGVGEKKITHHWHRSGSTIGKAFEATVRGAKRMAVLGDTAWDFGSVGGALNSLGKGIHQIFGAAFKSLFGGMSWFSQILIGTLLMWLGLNTKNGSISLMCLALGGVLIFLSTAVSA

SEQ ID NO: 193 - protein, 125 aa, unidentified
  source 1..125: note = Zika Virus
MKNPKKKSGGFRIVNMLKRGVARVSPFGGLKRLPAGLLLGHGPIRMVLAILAFLRFTAIKPSLGLINRWGSVGKKEAMEIIKKFKKDLAAMLRIINARKEKKRRGADTSVGIVGLLLTTAMAAEV

SEQ ID NO: 194 - protein, 362 aa, unidentified
  source 1..362: note = Zika Virus
VGCSVDFSKKETRCGTGVFVYNDVEAWRDRYKYHPDSPRRLAAAVKQAWEDGICGISSVSRMENIMWRSVEGELNAILEENGVQLTVVVGSVKNPMWRGPQRLPVPVNELPHGWKAWGKSHFVRAAKTNNSFVVDGDTLKECPLKHRAWNSFLVEDHGFGVFHTSVWLKVREDYSLECDPAVIGTAVKGKEAVHSDLGYWIESEKNDTWRLKRAHLIEMKTCEWPKSHTLWTDGIEESDLIIPKSLAGPLSHHNTREGYRTQMKGPWHSEELEIRFEECPGTKVHVEETCGTRGPSLRSTTASGRVIEEWCCRECTMPPLSFRAKDGCWYGMEIRPRKEPESNLVRSMVTAGSTDHMDHFSL

SEQ ID NO: 195 - protein, 218 aa, unidentified
  source 1..218: note = Zika Virus
GVLVILLMVQEGLKKRMTTKIIISTSMAVLVAMILGGFSMSDLAKLAILMGATFAEMNTGGDVAHLALIAAFKVRPALLVSFIFRANWTPRESMLLALASCLLQTAISALEGDLMVLINGFALAWLAIRAMVVPRTDNITLAILAALTPLARGTLLVAWRAGLATCGGFMLLSLKGKGSVKKNLPFVMALGLTAVRLVDPINVVGLLLLTRSGKRSWP

SEQ ID NO: 196 - protein, 144 aa, unidentified
  source 1..144: note = Zika Virus
PSEVLTAVGLICALAGGFAKADIEMAGPMAAVGLLIVSYVVSGKSVDMYIERAGDITWEKDAEVTGNSPRLDVALDESGDFSLVEDDGPPMREIILKVVLMTICGMNPIAIPFAAGAWYVYVKTGKRSGALWDVPAPKEVKKGE

SEQ ID NO: 197 - protein, 603 aa, unidentified
  source 1..603: note = Zika Virus
TTDGVYRVMTRRLLGSTQVGVGVMQEGVFHTMWHVTKGSALRSGEGRLDPYWGDVKQDLVSYCGPWKLDAAWDGHSEVQLLAVPPGERARNIQTLPGIFKTKDGDIGAVALDYPAGTSGSPILDKCGRVIGLYGNGVVIKNGSYVSAITQGRREEETPVECFEPSMLKKKQLTVLDLHPGAGKTRRVLPEIVREAIKTRLRTVILAPTRVVAAEMEEALRGLPVRYMTTAVNVTHSGTEIVDLMCHATFTSRLLQPIRVPNYNLYIMDEAHFTDPSSIAARGYISTRVEMGEAAAIFMTATPPGTRDAFPDSNSPIMDTEVEVPERAWSSGFDWVTDYSGKTVWFVPSVRNGNEIAACLTKAGKRVIQLSRKTFETEFQKTKHQEWDFVVTTDISEMGANFKADRVIDSRRCLKPVILDGERVILAGPMPVTHASAAQRRGRIGRNPNKPGDEYLYGGGCAETDEDHAHWLEARMLLDNIYLQDGLIASLYRPEADKVAAIEGEFKLRTEQRKTFVELMKRGDLPVWLAYQVASAGITYTDRRWCFDGTTNNTIMEDSVPAEVWTRHGEKRVLKPRWMDARVCSDHAALKSFKEFAAGKRGAA

SEQ ID NO: 198 - protein, 147 aa, unidentified
  source 1..147: note = Zika Virus
FGVMEALGTLPGHMTERFQEAIDNLAVLMRAETGSRPYKAAAAQLPETLETIMLLGLLGTVSLGIFFVLMRNKGIGKMGFGMVTLGASAWLMWLSEIEPARIACVLIVVFLLLVVLIPEPEKQRSPQDNQMAIIIMVAVGLLGLITA

SEQ ID NO: 199 - protein, 502 aa, unidentified
  source 1..502: note = Zika Virus
NELGWLERTKSDLSHLMGRREEGATMGFSMDIDLRPASAWAIYAALTTFITPAVQHAVTTSYNNYSLMAMATQAGVLFGMGKGMPFYAWDFGVPLLMIGCYSQLTPLTLIVAIILLVAHYMYLIPGLQAAAARAAQKRTAAGIMKNPVVDGIVVTDIDTMTIDPQVEKKMGQVLLMAVAVSSAILSRTAWGWGEAGALITAATSTLWEGSPNKYWNSSTATSLCNIFRGSYLAGASLIYTVTRNAGLVKRRGGGTGETLGEKWKARLNQMSALEFYSYKKSGITEVCREEARRALKDGVATGGHAVSRGSAKLRWLVERGYLQPYGKVIDLGCGRGGWSYYAATIRKVQEVKGYTKGGPGHEEPVLVQSYGWNIVRLKSGVDVFHMAAEPCDTLLCDIGESSSSPEVEEARTLRVLSMVGDWLEKRPGAFCIKVLCPYTSTMMETLERLQRRYGGGLVRVPLSRNSTHEMYWVSGAKSNTIKSVSTTSQLLLGRMDGPRRPV

SEQ ID NO: 200 - protein, 652 aa, unidentified
  source 1..652: note = Zika Virus
KYEEDVNLGSGTRAVVSCAEAPNMKIIGNRIERIRSEHAETWFFDENHPYRTWAYHGSYEAPTQGSASSLINGVVRLLSKPWDVVTGVTGIAMTDTTPYGQQRVFKEKVDTRVPDPQEGTRQVMSMVSSWLWKELGKHKRPRVCTKEEFINKVRSNAALGAIFEEEKEWKTAVEAVNDPRFWALVDKEREHHLRGECQSCVYNMMGKREKKQGEFGKAKGSRAIWYMWLGARFLEFEALGFLNEDHWMGRENSGGGVEGLGLQRLGYVLEEMSRIPGGRMYADDTAGWDTRISRFDLENEALITNQMEKGHRALALAIIKYTYQNKVVKVLRPAEKGKTVMDIISRQDQRGSGQVVTYALNTFTNLVVQLIRNMEAEEVLEMQDLWLLRRSEKVTNWLQSNGWDRLKRMAVSGDDCVVKPIDDRFAHALRFLNDMGKVRKDTQEWKPSTGWDNWEEVPFCSHHFNKLHLKDGRSIVVPCRHQDELIGRARVSPGAGWSIRETACLAKSYAQMWQLLYFHRRDLRLMANAICSSVPVDWVPTGRTTWSIHGKGEWMTTEDMLVVWNRVWIEENDHMEDKTPVTKWTDIPYLGKREDLWCGSLIGHRPRTTWAENIKNTVNMVRRIIGDEEKYMDYLSTQVRYLGEEGSTPGVL

SEQ ID NO: 201 - protein, 692 aa, unidentified
  source 1..692: note = Zika Virus
METPAQLLFLLLLWLPDTTGAEVTRRGSAYYMYLDRNDAGEAISFPTTLGMNKCYIQIMDLGHMCDATMSYECPMLDEGVEPDDVDCWCNTTSTWVVYGTCHHKKGEARRSRRAVTLPSHSTRKLQTRSQTWLESREYTKHLIRVENWIFRNPGFALAAAAIAWLLGSSTSQKVIYLVMILLIAPAYSIRCIGVSNRDFVEGMSGGTWVDIVLEHGGCVTVMAQDKPTVDIELVTTTVSNMAEVRSYCYEASISDMASDSRCPTQGEAYLDKQSDTQYVCKRTLVDRGWGNGCGLFGKGSLVTCAKFACSKKMTGKSIQPENLEYRIMLSVHGSQHSGMIVNDTGHETDENRAKVEITPNSPRAEATLGGFGSLGLDCEPRTGLDFSDLYYLTMNNKHWLVHKEWFHDIPLPWHAGADTGTPHWNNKEALVEFKDAHAKRQTVVVLGSQEGAVHTALAGALEAEMDGAKGRLSSGHLKCRLKMDKLRLKGVSYSLCTAAFTFTKIPAETLHGTVTVEVQYAGTDGPCKVPAQMAVDMQTLTPVGRLITANPVITESTENSKMMLELDPPFGDSYIVIGVGEKKITHHWHRSGSTIGKAFEATVRGAKRMAVLGDTAWDFGSVGGALNSLGKGIHQIFGAAFKSLFGGMSWFSQILIGTLLMWLGLNTKNGSISLMCLALGGVLIFLSTAVSA

SEQ ID NO: 202 - protein, 524 aa, unidentified
  source 1..524: note = Zika Virus
METPAQLLFLLLLWLPDTTGIRCIGVSNRDFVEGMSGGTWVDIVLEHGGCVTVMAQDKPTVDIELVTTTVSNMAEVRSYCYEASISDMASDSRCPTQGEAYLDKQSDTQYVCKRTLVDRGWGNGCGLFGKGSLVTCAKFACSKKMTGKSIQPENLEYRIMLSVHGSQHSGMIVNDTGHETDENRAKVEITPNSPRAEATLGGFGSLGLDCEPRTGLDFSDLYYLTMNNKHWLVHKEWFHDIPLPWHAGADTGTPHWNNKEALVEFKDAHAKRQTVVVLGSQEGAVHTALAGALEAEMDGAKGRLSSGHLKCRLKMDKLRLKGVSYSLCTAAFTFTKIPAETLHGTVTVEVQYAGTDGPCKVPAQMAVDMQTLTPVGRLITANPVITESTENSKMMLELDPPFGDSYIVIGVGEKKITHHWHRSGSTIGKAFEATVRGAKRMAVLGDTAWDFGSVGGALNSLGKGIHQIFGAAFKSLFGGMSWFSQILIGTLLMWLGLNTKNGSISLMCLALGGVLIFLSTAVSA

SEQ ID NO: 203 - protein, 690 aa, unidentified
  source 1..690: note = Zika Virus
MDWTWILFLVAAATRVHSVEVTRRGSAYYMYLDRSDAGEAISFPTTLGMNKCYIQIMDLGHMCDATMSYECPMLDEGVEPDDVDCWCNTTSTWVVYGTCHHKKGEARRSRRAVTLPSHSTRKLQTRSQTWLESREYTKHLIRVENWIFRNPGFALAAAAIAWLLGSSTSQKVIYLVMILLIAPAYSIRCIGVSNRDFVEGMSGGTWVDVVLEHGGCVTVMAQDKPAVDIELVTTTVSNMAEVRSYCYEASISDMASDSRCPTQGEAYLDKQSDTQYVCKRTLVDRGWGNGCGLFGKGSLVTCAKFACSKKMTGKSIQPENLEYRIMLSVHGSQHSGMIVNDTGHETDENRAKVEITPNSPRAEATLGGFGSLGLDCEPRTGLDFSDLYYLTMNNKHWLVHKEWFHDIPLPWHAGADTGTPHWNNKEALVEFKDAHAKRQTVVVLGSQEGAVHTALAGALEAEMDGAKGRLSSGHLKCRLKMDKLRLKGVSYSLCTAAFTFTKIPAETLHGTVTVEVQYAGTDGPCKVPAQMAVDMQTLTPVGRLITANPVITESTENSKMMLELDPPFGDSYIVIGVGEKKITHHWHRSGSTIGKAFEATVRGAKRMAVLGDTAWDFGSVGGALNSLGKGIHQIFGAAFKSLFGGMSWFSQILIGTLLVWLGLNTKNGSISLTCLALGGVLIFLSTAVSA

SEQ ID NO: 204 - protein, 690 aa, unidentified; identical to SEQ ID NO: 203
  source 1..690: note = Zika Virus

SEQ ID NO: 205 - protein, 687 aa, unidentified
  source 1..687: note = Zika Virus
MDWTWILFLVAAATRVHSTRRGSAYYMYLDRSDAGEAISFPTTLGMNKCYIQIMDLGHMCDATMSYECPMLDEGVEPDDVDCWCNTTSTWVVYGTCHHKKGEARRSRRAVTLPSHSTRKLQTRSQTWLESREYTKHLIRVENWIFRNPGFALAAAAIAWLLGSSTSQKVIYLVMILLIAPAYSIRCIGVSNRDFVEGMSGGTWVDVVLEHGGCVTVMAQDKPAVDIELVTTTVSNMAEVRSYCYEASISDMASDSRCPTQGEAYLDKQSDTQYVCKRTLVDRGWGNGCGLFGKGSLVTCAKFACSKKMTGKSIQPENLEYRIMLSVHGSQHSGMIVNDTGHETDENRAKVEITPNSPRAEATLGGFGSLGLDCEPRTGLDFSDLYYLTMNNKHWLVHKEWFHDIPLPWHAGADTGTPHWNNKEALVEFKDAHAKRQTVVVLGSQEGAVHTALAGALEAEMDGAKGRLSSGHLKCRLKMDKLRLKGVSYSLCTAAFTFTKIPAETLHGTVTVEVQYAGTDGPCKVPAQMAVDMQTLTPVGRLITANPVITESTENSKMMLELDPPFGDSYIVIGVGEKKITHHWHRSGSTIGKAFEATVRGAKRMAVLGDTAWDFGSVGGALNSLGKGIHQIFGAAFKSLFGGMSWFSQILIGTLLVWLGLNTKNGSISLTCLALGGVLIFLSTAVSA

SEQ ID NO: 206 - protein, 692 aa, unidentified
  source 1..692: note = Zika Virus
METPAQLLFLLLLWLPDTTGVEVTRRGSAYYMYLDRSDAGEAISFPTTLGMNKCYIQIMDLGHMCDATMSYECPMLDEGVEPDDVDCWCNTTSTWVVYGTCHHKKGEARRSRRAVTLPSHSTRKLQTRSQTWLESREYTKHLIRVENWIFRNPGFALAAAAIAWLLGSSTSQKVIYLVMILLIAPAYSIRCIGVSNRDFVEGMSGGTWVDVVLEHGGCVTVMAQDKPAVDIELVTTTVSNMAEVRSYCYEASISDMASDSRCPTQGEAYLDKQSDTQYVCKRTLVDRGWGNGCGLFGKGSLVTCAKFACSKKMTGKSIQPENLEYRIMLSVHGSQHSGMIVNDTGHETDENRAKVEITPNSPRAEATLGGFGSLGLDCEPRTGLDFSDLYYLTMNNKHWLVHKEWFHDIPLPWHAGADTGTPHWNNKEALVEFKDAHAKRQTVVVLGSQEGAVHTALAGALEAEMDGAKGRLSSGHLKCRLKMDKLRLKGVSYSLCTAAFTFTKIPAETLHGTVTVEVQYAGTDGPCKVPAQMAVDMQTLTPVGRLITANPVITESTENSKMMLELDPPFGDSYIVIGVGEKKITHHWHRSGSTIGKAFEATVRGAKRMAVLGDTAWDFGSVGGALNSLGKGIHQIFGAAFKSLFGGMSWFSQILIGTLLVWLGLNTKNGSISLTCLALGGVLIFLSTAVSA

SEQ ID NO: 207 - protein, 689 aa, unidentified
  source 1..689: note = Zika Virus
METPAQLLFLLLLWLPDTTGTRRGSAYYMYLDRSDAGEAISFPTTLGMNKCYIQIMDLGHMCDATMSYECPMLDEGVEPDDVDCWCNTTSTWVVYGTCHHKKGEARRSRRAVTLPSHSTRKLQTRSQTWLESREYTKHLIRVENWIFRNPGFALAAAAIAWLLGSSTSQKVIYLVMILLIAPAYSIRCIGVSNRDFVEGMSGGTWVDVVLEHGGCVTVMAQDKPAVDIELVTTTVSNMAEVRSYCYEASISDMASDSRCPTQGEAYLDKQSDTQYVCKRTLVDRGWGNGCGLFGKGSLVTCAKFACSKKMTGKSIQPENLEYRIMLSVHGSQHSGMIVNDTGHETDENRAKVEITPNSPRAEATLGGFGSLGLDCEPRTGLDFSDLYYLTMNNKHWLVHKEWFHDIPLPWHAGADTGTPHWNNKEALVEFKDAHAKRQTVVVLGSQEGAVHTALAGALEAEMDGAKGRLSSGHLKCRLKMDKLRLKGVSYSLCTAAFTFTKIPAETLHGTVTVEVQYAGTDGPCKVPAQMAVDMQTLTPVGRLITANPVITESTENSKMMLELDPPFGDSYIVIGVGEKKITHHWHRSGSTIGKAFEATVRGAKRMAVLGDTAWDFGSVGGALNSLGKGIHQIFGAAFKSLFGGMSWFSQILIGTLLVWLGLNTKNGSISLTCLALGGVLIFLSTAVSA

SEQ ID NO: 208 - protein, 524 aa, unidentified
  source 1..524: note = Zika Virus
METPAQLLFLLLLWLPDTTGIRCIGVSNRDFVEGMSGGTWVDVVLEHGGCVTVMAQDKPAVDIELVTTTVSNMAEVRSYCYEASISDMASDSRCPTQGEAYLDKQSDTQYVCKRTLVDRGWGNGCGLFGKGSLVTCAKFACSKKMTGKSIQPENLEYRIMLSVHGSQHSGMIVNDTGHETDENRAKVEITPNSPRAEATLGGFGSLGLDCEPRTGLDFSDLYYLTMNNKHWLVHKEWFHDIPLPWHAGADTGTPHWNNKEALVEFKDAHAKRQTVVVLGSQEGAVHTALAGALEAEMDGAKGRLSSGHLKCRLKMDKLRLKGVSYSLCTAAFTFTKIPAETLHGTVTVEVQYAGTDGPCKVPAQMAVDMQTLTPVGRLITANPVITESTENSKMMLELDPPFGDSYIVIGVGEKKITHHWHRSGSTIGKAFEATVRGAKRMAVLGDTAWDFGSVGGALNSLGKGIHQIFGAAFKSLFGGMSWFSQILIGTLLVWLGLNTKNGSISLTCLALGGVLIFLSTAVSA

SEQ ID NO: 209 - protein, 687 aa, unidentified; identical to SEQ ID NO: 205
  source 1..687: note = Zika Virus

SEQ ID NO: 210 - protein, 692 aa, unidentified; identical to SEQ ID NO: 206
  source 1..692: note = Zika Virus

SEQ ID NO: 211 - protein, 689 aa, unidentified; identical to SEQ ID NO: 207
  source 1..689: note = Zika Virus

SEQ ID NO: 212 - protein, 524 aa, unidentified; identical to SEQ ID NO: 208
  source 1..524: note = Zika Virus

SEQ ID NO: 213 - protein, 672 aa, unidentified; identical to SEQ ID NO: 173
  source 1..672: note = Zika Virus

SEQ ID NO: 214 - protein, 696 aa, unidentified
  source 1..696: note = Zika Virus
MLGSNSGQRVVFTILLLLVAPAYSAEVTRRGSAYYMYLDRNDAGEAISFPTTLGMNKCYIQIMDLGHMCDATMSYECPMLDEGVEPDDVDCWCNTTSTWVVYGTCHHKKGEARRSRRAVTLPSHSTRKLQTRSQTWLESREYTKHLIRVENWIFRNPGFALAAAAIAWLLGSSTSQKVIYLVMILLIAPAYSIRCIGVSNRDFVEGMSGGTWVDVVLEHGGCVTVMAQDKPTVDIELVTTTVSNMAEVRSYCYEASISDMASDSRCPTQGEAYLDKQSDTQYVCKRTLVDRGWGNGCGLFGKGSLVTCAKFACSKKMTGKSIQPENLEYRIMLSVHGSQHSGMIVNDTGHETDENRAKVEITPNSPRAEATLGGFGSLGLDCEPRTGLDFSDLYYLTMNNKHWLVHKEWFHDIPLPWHAGADTGTPHWNNKEALVEFKDAHAKRQTVVVLGSQEGAVHTALAGALEAEMDGAKGRLSSGHLKCRLKMDKLRLKGVSYSLCTAAFTFTKIPAETLHGTVTVEVQYAGTDGPCKVPAQMAVDMQTLTPVGRLITANPVITESTENSKMMLELDPPFGDSYIVIGVGEKKITHHWHRSGSTIGKAFEATVRGAKRMAVLGDTAWDFGSVGGALNSLGKGIHQIFGAAFKSLFGGMSWFSQILIGTLLMWLGLNTKNGSISLMCLALGGVLIFLSTAVSA

SEQ ID NO: 215 - protein, 671 aa, unidentified
  source 1..671: note = Zika Virus
EVTRRGSAYYMYLDRNDAGEAISFPTTLGMNKCYIQIMDLGHMCDATMSYECPMLDEGVEPDDVDCWCNTTSTWVVYGTCHHKKGEARRSRRAVTLPSHSTRKLQTRSQTWLESREYTKHLIRVENWIFRNPGFALAAAAIAWLLGSSTSQKVIYLVMILLIAPAYSIRCIGVSNRDFVEGMSGGTWVDVVLEHGGCVTVMAQDKPTVDIELVTTTVSNMAEVRSYCYEASISDMASDSRCPTQGEAYLDKQSDTQYVCKRTLVDRGWGNGCGLFGKGSLVTCAKFACSKKMTGKSIQPENLEYRIMLSVHGSQHSGMIVNDTGHETDENRAKVEITPNSPRAEATLGGFGSLGLDCEPRTGLDFSDLYYLTMNNKHWLVHKEWFHDIPLPWHAGADTGTPHWNNKEALVEFKDAHAKRQTVVVLGSQEGAVHTALAGALEAEMDGAKGRLSSGHLKCRLKMDKLRLKGVSYSLCTAAFTFTKIPAETLHGTVTVEVQYAGTDGPCKVPAQMAVDMQTLTPVGRLITANPVITESTENSKMMLELDPPFGDSYIVIGVGEKKITHHWHRSGSTIGKAFEATVRGAKRMAVLGDTAWDFGSVGGALNSLGKGIHQIFGAAFKSLFGGMSWFSQILIGTLLMWLGLNTKNGSISLMCLALGGVLIFLSTAVSA

SEQ ID NO: 216 - protein, 688 aa, unidentified
  source 1..688: note = Zika Virus
MKCLLYLAFLFIGVNCAEVTRRGSAYYMYLDRNDAGEAISFPTTLGMNKCYIQIMDLGHMCDATMSYECPMLDEGVEPDDVDCWCNTTSTWVVYGTCHHKKGEARRSRRAVTLPSHSTRKLQTRSQTWLESREYTKHLIRVENWIFRNPGFALAAAAIAWLLGSSTSQKVIYLVMILLIAPAYSIRCIGVSNRDFVEGMSGGTWVDVVLEHGGCVTVMAQDKPTVDIELVTTTVSNMAEVRSYCYEASISDMASDSRCPTQGEAYLDKQSDTQYVCKRTLVDRGWGNGCGLFGKGSLVTCAKFACSKKMTGKSIQPENLEYRIMLSVHGSQHSGMIVNDTGHETDENRAKVEITPNSPRAEATLGGFGSLGLDCEPRTGLDFSDLYYLTMNNKHWLVHKEWFHDIPLPWHAGADTGTPHWNNKEALVEFKDAHAKRQTVVVLGSQEGAVHTALAGALEAEMDGAKGRLSSGHLKCRLKMDKLRLKGVSYSLCTAAFTFTKIPAETLHGTVTVEVQYAGTDGPCKVPAQMAVDMQTLTPVGRLITANPVITESTENSKMMLELDPPFGDSYIVIGVGEKKITHHWHRSGSTIGKAFEATVRGAKRMAVLGDTAWDFGSVGGALNSLGKGIHQIFGAAFKSLFGGMSWFSQILIGTLLMWLGLNTKNGSISLMCLALGGVLIFLSTAVSA

SEQ ID NO: 217 - protein, 672 aa, synthetic construct
  REGION 1..672: note = Synthetic Polynucleotide
VEVTRRGSAYYMYLDRSDAGEAISFPTTLGMNKCYIQIMDLGHMCDATMSYECPMLDEGVEPDDVDCWCNTTSTWVVYGTCHHKKGEARRSRRAVTLPSHSTRKLQTRSQTWLESREYTKHLIRVENWIFRNPGFALAAAAIAWLLGSSTSQKVIYLVMILLIAPAYSIRCIGVSNRDFVEGMSGGTWVDVVLEHGGCVTVMAQDKPAVDIELVTTTVSNMAEVRSYCYEASISDMASDSRCPTQGEAYLDKQSDTQYVCKRTLVDRGWGNGCGLFGKGSLVTCAKFACSKKMTGKSIQPENLEYRIMLSVHGSQHSGMIVADTGHETDENRAKVEITPNSPRAEATLGGFGSLGLDCEPRTGLDFSDLYYLTMNNKHWLVHKEWFHDIPLPWHAGADTGTPHWNNKEALVEFKDAHAKRQTVVVLGSQEGAVHTALAGALEAEMDGAKGRLSSGHLKCRLKMDKLRLKGVSYSLCTAAFTFTKIPAETLHGTVTVEVQYAGTDGPCKVPAQMAVDMQTLTPVGRLITANPVITESTENSKMMLELDPPFGDSYIVIGVGEKKITHHWHRSGSTIGKAFEATVRGAKRMAVLGDTAWDFGSVGGALNSLGKGIHQIFGAAFKSLFGGMSWFSQILIGTLLVWLGLNTKNGSISLTCLALGGVLIFLSTAVSA

SEQ ID NO: 218 - protein, 690 aa, synthetic construct
  REGION 1..690: note = Synthetic Polynucleotide
MDWTWILFLVAAATRVHSVEVTRRGSAYYMYLDRSDAGEAISFPTTLGMNKCYIQIMDLGHMCDATMSYECPMLDEGVEPDDVDCWCNTTSTWVVYGTCHHKKGEARRSRRAVTLPSHSTRKLQTRSQTWLESREYTKHLIRVENWIFRNPGFALAAAAIAWLLGSSTSQKVIYLVMILLIAPAYSIRCIGVSNRDFVEGMSGGTWVDVVLEHGGCVTVMAQDKPAVDIELVTTTVSNMAEVRSYCYEASISDMASDSRCPTQGEAYLDKQSDTQYVCKRTLVDRGWGNGCGLFGKGSLVTCAKFACSKKMTGKSIQPENLEYRIMLSVHGSQHSGMIVADTGHETDENRAKVEITPNSPRAEATLGGFGSLGLDCEPRTGLDFSDLYYLTMNNKHWLVHKEWFHDIPLPWHAGADTGTPHWNNKEALVEFKDAHAKRQTVVVLGSQEGAVHTALAGALEAEMDGAKGRLSSGHLKCRLKMDKLRLKGVSYSLCTAAFTFTKIPAETLHGTVTVEVQYAGTDGPCKVPAQMAVDMQTLTPVGRLITANPVITESTENSKMMLELDPPFGDSYIVIGVGEKKITHHWHRSGSTIGKAFEATVRGAKRMAVLGDTAWDFGSVGGALNSLGKGIHQIFGAAFKSLFGGMSWFSQILIGTLLVWLGLNTKNGSISLTCLALGGVLIFLSTAVSA

SEQ ID NO: 219 - protein, 687 aa, synthetic construct
  REGION 1..687: note = Synthetic Polynucleotide
MWLVSLAIVTACAGAAEVTRRGSAYYMYLDRNDAGEAISFPTTLGMNKCYIQIMDLGHMCDATMSYECPMLDEGVEPDDVDCWCNTTSTWVVYGTCHHKKGEARRSRRAVTLPSHSTRKLQTRSQTWLESREYTKHLIRVENWIFRNPGFALAAAAIAWLLGSSTSQKVIYLVMILLIAPAYSIRCIGVSNRDFVEGMSGGTWVDVVLEHGGCVTVMAQDKPTVDIELVTTTVSNMAEVRSYCYEASISDMASDSRCPTQGEAYLDKQSDTQYVCKRTLVDRGWGNGCGLFGKGSLVTCAKFACSKKMTGKSIQPENLEYRIMLSVHGSQHSGMIVNDTGHETDENRAKVEITPNSPRAEATLGGFGSLGLDCEPRTGLDFSDLYYLTMNNKHWLVHKEWFHDIPLPWHAGADTGTPHWNNKEALVEFKDAHAKRQTVVVLGSQEGAVHTALAGALEAEMDGAKGRLSSGHLKCRLKMDKLRLKGVSYSLCTAAFTFTKIPAETLHGTVTVEVQYAGTDGPCKVPAQMAVDMQTLTPVGRLITANPVITESTENSKMMLELDPPFGDSYIVIGVGEKKITHHWHRSGSTIGKAFEATVRGAKRMAVLGDTAWDFGSVGGALNSLGKGIHQIFGAAFKSLFGGMSWFSQILIGTLLMWLGLNTKNGSISLMCLALGGVLIFLSTAVSA

SEQ ID NO: 220 - protein, 672 aa, synthetic construct; identical to SEQ ID NO: 173
  REGION 1..672: note = Synthetic Polynucleotide

SEQ ID NO: 221 - protein, 687 aa, synthetic construct
  REGION 1..687: note = Synthetic Polynucleotide
MWLVSLAIVTACAGAAEVTRRGSAYYMYLDRNDAGEAISFPTTLGMNKCYIQIMDLGHMCDATMSYECPMLDEGVEPDDVDCWCNTTSTWVVYGTCHHKKGEARRSRRAVTLPSHSTRKLQTRSQTWLESREYTKHLIRVENWIFRNPGFALAAAAIAWLLGSSTSQKVIYLVMILLIAPAYSIRCIGVSNRDFVEGMSGGTWVDVVLEHGGCVTVMAQDKPTVDIELVTTTVSNMAEVRSYCYEASISDMASDSRCPREGEAYLDKQSDTQYVCKRTLVDRGRGNGCGRFGKGSLVTCAKFACSKKMTGKSIQPENLEYRIMLSVHGSQHSGMIVNDTGHETDENRAKVEITPNSPRAEATLGGFGSLGLDCEPRTGLDFSDLYYLTMNNKHWLVHKEWFHDIPLPWHAGADTGTPHWNNKEALVEFKDAHAKRQTVVVLGSQEGAVHTALAGALEAEMDGAKGRLSSGHLKCRLKMDKLRLKGVSYSLCTAAFTFTKIPAETLHGTVTVEVQYAGTDGPCKVPAQMAVDMQTLTPVGRLITANPVITESTENSKMMLELDPPFGDSYIVIGVGEKKITHHWHRSGSTIGKAFEATVRGAKRMAVLGDTAWDFGSVGGALNSLGKGIHQIFGAAFKSLFGGMSWFSQILIGTLLMWLGLNTKNGSISLMCLALGGVLIFLSTAVSA

SEQ ID NO: 222 - protein, 672 aa, synthetic construct
  REGION 1..672: note = Synthetic Polynucleotide
AEVTRRGSAYYMYLDRNDAGEAISFPTTLGMNKCYIQIMDLGHMCDATMSYECPMLDEGVEPDDVDCWCNTTSTWVVYGTCHHKKGEARRSRRAVTLPSHSTRKLQTRSQTWLESREYTKHLIRVENWIFRNPGFALAAAAIAWLLGSSTSQKVIYLVMILLIAPAYSIRCIGVSNRDFVEGMSGGTWVDVVLEHGGCVTVMAQDKPTVDIELVTTTVSNMAEVRSYCYEASISDMASDSRCPREGEAYLDKQSDTQYVCKRTLVDRGRGNGCGRFGKGSLVTCAKFACSKKMTGKSIQPENLEYRIMLSVHGSQHSGMIVNDTGHETDENRAKVEITPNSPRAEATLGGFGSLGLDCEPRTGLDFSDLYYLTMNNKHWLVHKEWFHDIPLPWHAGADTGTPHWNNKEALVEFKDAHAKRQTVVVLGSQEGAVHTALAGALEAEMDGAKGRLSSGHLKCRLKMDKLRLKGVSYSLCTAAFTFTKIPAETLHGTVTVEVQYAGTDGPCKVPAQMAVDMQTLTPVGRLITANPVITESTENSKMMLELDPPFGDSYIVIGVGEKKITHHWHRSGSTIGKAFEATVRGAKRMAVLGDTAWDFGSVGGALNSLGKGIHQIFGAAFKSLFGGMSWFSQILIGTLLMWLGLNTKNGSISLMCLALGGVLIFLSTAVSA

SEQ ID NO: 223 - DNA, 10735 bp, unidentified
  source 1..10735: mol_type = genomic DNA; note = Dengue Virus
agttgttagtctacgtggaccgacaagaacagtttcgaatcggaagcttgcttaacgtagttctaacagttttttattagagagcagatctctgatgaacaaccaacggaaaaagacgggtcgaccgtctttcaatatgctgaaacgcgcgagaaaccgcgtgtcaactgtttcacagttggcgaagagattctcaaaaggattgctttcaggccaaggacccatgaaattggtgatggcttttatagcattcctaagatttctagccatacctccaacagcaggaattttggctagatggggctcattcaagaagaatggagcgatcaaagtgttacggggtttcaagaaagaaatctcaaacatgttgaacataatgaacaggaggaaaagatctgtgaccatgctcctcatgctgctgcccacagccctggcgttccatctgaccacccgagggggagagccgcacatgatagttagcaagcaggaaagaggaaaatcacttttgtttaagacctctgcaggtgtcaacatgtgcacccttattgcaatggatttgggagagttatgtgaggacacaatgacctacaaatgcccccggatcactgagacggaaccagatgacgttgactgttggtgcaatgccacggagacatgggtgacctatggaacatgttctcaaactggtgaacaccgacgagacaaacgttccgtcgcactggcaccacacgtagggcttggtctagaaacaagaaccgaaacgtggatgtcctctgaaggcgcttggaaacaaatacaaaaagtggagacctgggctctgagacacccaggattcacggtgatagccctttttctagcacatgccataggaacatccatcacccagaaagggatcatttttattttgctgatgctggtaactccatccatggccatgcggtgcgtgggaataggcaacagagacttcgtggaaggactgtcaggagctacgtgggtggatgtggtactggagcatggaagttgcgtcactaccatggcaaaagacaaaccaacactggacattgaactcttgaagacggaggtcacaaaccctgccgtcctgcgcaaactgtgcattgaagctaaaatatcaaacaccaccaccgattcgagatgtccaacacaaggagaagccacgctggtggaagaacaggacacgaactttgtgtgtcgacgaacgttcgtggacagaggctggggcaatggttgtgggctattcggaaaaggtagcttaataacgtgtgctaagtttaagtgtgtgacaaaactggaaggaaagatagtccaatatgaaaacttaaaatattcagtgatagtcaccgtacacactggagaccagcaccaagttggaaatgagaccacagaacatggaacaactgcaaccataacacctcaagctcccacgtcggaaatacagctgacagactacggagctctaacattggattgttcacctagaacagggctagactttaatgagatggtgttgttgacaatgaaaaaaaaatcatggctcgtccacaaacaatggtttctagacttaccactgccttggacctcgggggcttcaacatcccaagagacttggaatagacaagacttgctggtcacatttaagacagctcatgcaaaaaagcaggaagtagtcgtactaggatcacaagaaggagcaatgcacactgcgttgactggagcgacagaaatccaaacgtctggaacgacaacaatttttgcaggacacctgaaatgcagattaaaaatggataaactgattttaaaagggatgtcatatgtaatgtgcacagggtcattcaagttagagaaggaagtggctgagacccagcatggaactgttctagtgcaggttaaatacgaaggaacagatgcaccatgcaagatccccttctcgtcccaagatgagaagggagtaacccagaatgggagattgataacagccaaccccatagtcactgacaaagaaaaaccagtcaacattgaagcggagccaccttttggtgagagctacattgtggtaggagcaggtgaaaaagctttgaaactaagctggttcaagaagggaagcagtatagggaaaatgtttgaagcaactgcccgtggagcacgaaggatggccatcctgggagacactgcatgggacttcggttctataggaggggtgttcacgtctgtgggaaaactgatacaccagatttttgggactgcgtatggagttttgttcagcggtgtttcttggaccatgaagataggaatagggattctgctgacatggctaggattaaactcaaggagcacgtccctttcaatgacgtgtatcgcagttggcatggtcacactgtacctaggagtcatggttcaggcggactcgggatgtgtaatcaactggaaaggcagagaactcaaatgtggaagcggcatttttgtcaccaatgaagtccacacctggacagagcaatataaattccaggccgactcccctaagagactatcagcggccattgggaaggcatgggaggagggtgtgtgtggaattcgatcagccactcgtctcgagaacatcatgtggaagcaaatatcaaatgaattaaaccacatcttacttgaaaatgacatgaaatttacagtggtcgtaggagacgttagtggaatcttggcccaaggaaagaaaatgattaggccacaacccatggaacacaaatactcgtggaaaagctggggaaaagccaaaatcataggagcagatgtacagaataccaccttcatcatcgacggcccaaacaccccagaatgccctgataaccaaagagcatggaacatttgggaagttgaagactatggatttggaattttcacgacaaacatatggttgaaattgcgtgactcctacactcaagtgtgtgaccaccggctaatgtcagctgccatcaaggatagcaaagcagtccatgctgacatggggtactggatagaaagtgaaaagaacgagacttggaagttggcaagagcctccttcatagaagttaagacatgcatctggccaaaatcccacactctatggagcaatggagtcctggaaagtgagatgataatcccaaagatatatggaggaccaatatctcagcacaactacagaccaggatatttcacacaaacagcagggccgtggcacttgggcaagttagaactagattttgatttatgtgaaggtaccactgttgttgtggatgaacattgtggaaatcgaggaccatctcttagaaccacaacagtcacaggaaagacaatccatgaatggtgctgtagatcttgcacgttaccccccctacgtttcaaaggagaagacgggtgctggtacggcatggaaatcagaccagtcaaggagaaggaagagaacctagttaagtcaatggtctctgcagggtcaggagaagtggacagtttttcactaggactgctatgcatatcaataatgatcgaagaggtaatgagatccagatggagcagaaaaatgctgatgactggaacattggctgtgttcctccttctcacaatgggacaattgacatggaatgatctgatcaggctatgtatcatggttggagccaacgcttcagacaagatggggatgggaacaacgtacctagctttgatggccactttcagaatgagaccaatgttcgcagtcgggctactgtttcgcagattaacatctagagaagttcttcttcttacagttggattgagtctggtggcatctgtagaactaccaaattccttagaggagctaggggatggacttgcaatgggcatcatgatgttgaaattactgactgattttcagtcacatcagctatgggctaccttgctgtctttaacatttgtcaaaacaactttttcattgcactatgcatggaagacaatggctatgatactgtcaattgtatctctcttccctttatgcctgtccacgacttctcaaaaaacaacatggcttccggtgttgctgggatctcttggatgcaaaccactaaccatgtttcttataacagaaaacaaaatctggggaaggaaaagctggcctctcaatgaaggaattatggctgttggaatagttagcattcttctaagttcacttctcaagaatgatgtgccactagctggcccactaatagctggaggcatgctaatagcatgttatgtcatatctggaagctcggccgatttatcactggagaaagcggctgaggtctcctgggaagaagaagcagaacactctggtgcctcacacaacatactagtggaggtccaagatgatggaaccatgaagataaaggatgaagagagagatgacacactcaccattctcctcaaagcaactctgctagcaatctcaggggtatacccaatgtcaataccggcgaccctctttgtgtggtatttttggcagaaaaagaaacagagatcaggagtgctatgggacacacccagccctccagaagtggaaagagcagtccttgatgatggcatttatagaattctccaaagaggattgttgggcaggtctcaagtaggagtaggagtttttcaagaaggcgtgttccacacaatgtggcacgtcaccaggggagctgtcctcatgtaccaagggaagagactggaaccaagttgggccagtgtcaaaaaagacttgatctcatatggaggaggttggaggtttcaaggatcctggaacgcgggagaagaagtgcaggtgattgctgttgaaccggggaagaaccccaaaaatgtacagacagcgccgggtaccttcaagacccctgaaggcgaagttggagccatagctctagactttaaacccggcacatctggatctcctatcgtgaacagagagggaaaaatagtaggtctttatggaaatggagtggtgacaacaagtggtacctacgtcagtgccatagctcaagctaaagcatcacaagaagggcctctaccagagattgaggacgaggtgtttaggaaaagaaacttaacaataatggacctacatccaggatcgggaaaaacaagaagataccttccagccatagtccgtgaggccataaaaagaaagctgcgcacgctagtcttagctcccacaagagttgtcgcttctgaaatggcagaggcgctcaagggaatgccaataaggtatcagacaacagcagtgaagagtgaacacacgggaaaggagatagttgaccttatgtgtcacgccactttcactatgcgtctcctgtctcctgtgagagttcccaattataatatgattatcatggatgaagcacattttaccgatccagccagcatagcagccagagggtatatctcaacccgagtgggtatgggtgaagcagctgcgattttcatgacagccactccccccggatcggtggaggcctttccacagagcaatgcagttatccaagatgaggaaagagacattcctgaaagatcatggaactcaggctatgactggatcactgatttcccaggtaaaacagtctggtttgttccaagcatcaaatcaggaaatgacattgccaactgtttaagaaagaatgggaaacgggtggtccaattgagcagaaaaacttttgacactgagtaccagaaaacaaaaaataacgactgggactatgttgtcacaacagacatatccgaaatgggagcaaacttccgagccgacagggtaatagacccgaggcggtgcctgaaaccggtaatactaaaagatggcccagagcgtgtcattctagccggaccgatgccagtgactgtggctagcgccgcccagaggagaggaagaattggaaggaaccaaaataaggaaggcgatcagtatatttacatgggacagcctctaaacaatgatgaggaccacgcccattggacagaagcaaaaatgctccttgacaacataaacacaccagaagggattatcccagccctctttgagccggagagagaaaagagtgcagcaatagacggggaatacagactacggggtgaagcgaggaaaacgttcgtggagctcatgagaagaggagatctacctgtctggctatcctacaaagttgcctcagaaggcttccagtactccgacagaaggtggtgctttgatggggaaaggaacaaccaggtgttggaggagaacatggacgtggagatctggacaaaagaaggagaaagaaagaaactacgaccccgctggctggatgccagaacatactctgacccactggctctgcgcgaattcaaagagttcgcagcaggaagaagaagcgtctcaggtgacctaatattagaaatagggaaacttccacaacatttaacgcaaagggcccagaacgccttggacaatctggttatgttgcacaactctgaacaaggaggaaaagcctatagacacgccatggaagaactaccagacaccatagaaacgttaatgctcctagctttgatagctgtgctgactggtggagtgacgttgttcttcctatcaggaaggggtctaggaaaaacatccattggcctactctgcgtgattgcctcaagtgcactgttatggatggccagtgtggaaccccattggatagcggcctctatcatactggagttctttctgatggtgttgcttattccagagccggacagacagcgcactccacaagacaaccagctagcatacgtggtgataggtctgttattcatgatattgacagtggcagccaatgagatgggattactggaaaccacaaagaaggacctggggattggtcatgcagctgctgaaaaccaccatcatgctgcaatgctggacgtagacctacatccagcttcagcctggactctctatgcagtggccacaacaattatcactcccatgatgagacacacaattgaaaacacaacggcaaatatttccctgacagctattgcaaaccaggcagctatattgatgggacttgacaagggatggccaatatcaaagatggacataggagttccacttctcgccttggggtgctattctcaggtgaacccgctgacgctgacagcggcggtattgatgctagtggctcattatgccataattggacccggactgcaagcaaaagctactagagaagctcaaaaaaggacagcagccggaataatgaaaaacccaactgtcgacgggatcgttgcaatagatttggaccctgtggtttacgatgcaaaatttgaaaaacagctaggccaaataatgttgttgatactttgcacatcacagatcctcctgatgcggaccacatgggccttgtgtgaatccatcacactagccactggacctctgactacgctttgggagggatctccaggaaaattctggaacaccacgatagcggtgtccatggcaaacatttttaggggaagttatctagcaggagcaggtctggccttttcattaatgaaatctctaggaggaggtaggagaggcacgggagcccaaggggaaacactgggagaaaaatggaaaagacagctaaaccaattgagcaagtcagaattcaacacttacaaaaggagtgggattatagaggtggatagatctgaagccaaagaggggttaaaaagaggagaaacgactaaacacgcagtgtcgagaggaacggccaaactgaggtggtttgtggagaggaaccttgtgaaaccagaagggaaagtcatagacctcggttgtggaagaggtggctggtcatattattgcgctgggctgaagaaagtcacagaagtgaaaggatacacgaaaggaggacctggacatgaggaaccaatcccaatggcaacctatggatggaacctagtaaagctatactccgggaaagatgtattctttacaccacctgagaaatgtgacaccctcttgtgtgatattggtgagtcctctccgaacccaactatagaagaaggaagaacgttacgtgttctaaagatggtggaaccatggctcagaggaaaccaattttgcataaaaattctaaatccctatatgccgagtgtggtagaaactttggagcaaatgcaaagaaaacatggaggaatgctagtgcgaaatccactctcaagaaactccactcatgaaatgtactgggtttcatgtggaacaggaaacattgtgtcagcagtaaacatgacatctagaatgctgctaaatcgattcacaatggctcacaggaagccaacatatgaaagagacgtggacttaggcgctggaacaagacatgtggcagtagaaccagaggtggccaacctagatatcattggccagaggatagagaatataaaaaatgaacacaaatcaacatggcattatgatgaggacaatccatacaaaacatgggcctatcatggatcatatgaggtcaagccatcaggatcagcctcatccatggtcaatggtgtggtgagactgctaaccaaaccatgggatgtcattcccatggtcacacaaatagccatgactgacaccacaccctttggacaacagagggtgtttaaagagaaagttgacacgcgtacaccaaaagcgaaacgaggcacagcacaaattatggaggtgacagccaggtggttatggggttttctctctagaaacaaaaaacccagaatctgcacaagagaggagttcacaagaaaagtcaggtcaaacgcagctattggagcagtgttcgttgatgaaaatcaatggaactcagcaaaagaggcagtggaagatgaacggttctgggaccttgtgcacagagagagggagcttcataaacaaggaaaatgtgccacgtgtgtctacaacatgatgggaaagagagagaaaaaattaggagagttcggaaaggcaaaaggaagtcgcgcaatatggtacatgtggttgggagcgcgctttttagagtttgaagcccttggtttcatgaatgaagatcactggttcagcagagagaattcactcagtggagtggaaggagaaggactccacaaacttggatacatactcagagacatatcaaagattccagggggaaatatgtatgcagatgacacagccggatgggacacaagaataacagaggatgatcttcagaatgaggccaaaatcactgacatcatggaacctgaacatgccctattggccacgtcaatctttaagctaacctaccaaaacaaggtagtaagggtgcagagaccagcgaaaaatggaaccgtgatggatgtcatatccagacgtgaccagagaggaagtggacaggttggaacctatggcttaaacaccttcaccaacatggaggcccaactaataagacaaatggagtctgagggaatcttttcacccagcgaattggaaaccccaaatctagccgaaagagtcctcgactggttgaaaaaacatggcaccgagaggctgaaaagaatggcaatcagtggagatgactgtgtggtgaaaccaatcgatgacagatttgcaacagccttaacagctttgaatgacatgggaaaggtaagaaaagacataccgcaatgggaaccttcaaaaggatggaatgattggcaacaagtgcctttctgttcacaccatttccaccagctgattatgaaggatgggagggagatagtggtgccatgccgcaaccaagatgaacttgtaggtagggccagagtatcacaaggcgccggatggagcttgagagaaactgcatgcctaggcaagtcatatgcacaaatgtggcagctgatgtacttccacaggagagacttgagattagcggctaatgctatctgttcagccgttccagttgattgggtcccaaccagccgcaccacctggtcgatccatgcccaccatcaatggatgacaacagaagacatgttgtcagtgtggaatagggtttggatagaggaaaacccatggatggaggacaagactcatgtgtccagttgggaagacgttccatacctaggaaaaagggaagatcaatggtgtggttccctaataggcttaacagcacgagccacctgggccaccaacatacaagtggccataaaccaagtgagaaggctcattgggaatgagaattatctagacttcatgacatcaatgaagagattcaaaaacgagagtgatcccgaaggggcactctggtaagccaactcattcacaaaataaaggaaaataaaaaatcaaacaaggcaagaagtcaggccggattaagccatagcacggtaagagctatgctgcctgtgagccccgtccaaggacgtaaaatgaagtcaggccgaaagccacggttcgagcaagccgtgctgcctgtagctccatcgtggggatgtaaaaacccgggaggctgcaaaccatggaagctgtacgcatggggtagcagactagtggttagaggagacccctcccaagacacaacgcagcagcggggcccaacaccaggggaagctgtaccctggtggtaaggactagaggttagaggagaccccccgcacaacaacaaacagcatattgacgctgggagagaccagagatcctgctgtctctacagcatcattccaggcacagaacgccaaaaaatggaatggtgctgttgaatcaacaggttct

SEQ ID NO: 224 - DNA, 10723 bp, unidentified
  source 1..10723: mol_type = genomic DNA; note = Dengue Virus
agttgttagtctacgtggaccgacaaagacagattctttgagggagctaagctcaacgtagttctaacagttttttaattagagagcagatctctgatgaataaccaacggaaaaaggcgaaaaacacgcctttcaatatgctgaaacgcgagagaaaccgcgtgtcgactgtgcaacagctgacaaagagattctcacttggaatgctgcagggacgaggaccattaaaactgttcatggccctggtggcgttccttcgtttcctaacaatcccaccaacagcagggatattgaagagatggggaacaattaaaaaatcaaaagctattaatgttttgagagggttcaggaaagagattggaaggatgctgaacatcttgaataggagacgcagatctgcaggcatgatcattatgctgattccaacagtgatggcgttccatttaaccacacgtaacggagaaccacacatgatcgtcagcagacaagagaaagggaaaagtcttctgtttaaaacagaggatggcgtgaacatgtgtaccctcatggccatggaccttggtgaattgtgtgaagacacaatcacgtacaagtgtccccttctcaggcagaatgagccagaagacatagactgttggtgcaactctacgtccacgtgggtaacttatgggacgtgtaccaccatgggagaacatagaagagaaaaaagatcagtggcactcgttccacatgtgggaatgggactggagacacgaactgaaacatggatgtcatcagaaggggcctggaaacatgtccagagaattgaaacttggatcttgagacatccaggcttcaccatgatggcagcaatcctggcatacaccataggaacgacacatttccaaagagccctgattttcatcttactgacagctgtcactccttcaatgacaatgcgttgcataggaatgtcaaatagagactttgtggaaggggtttcaggaggaagctgggttgacatagtcttagaacatggaagctgtgtgacgacgatggcaaaaaacaaaccaacattggattttgaactgataaaaacagaagccaaacagcctgccaccctaaggaagtactgtatagaggcaaagctaaccaacacaacaacagaatctcgctgcccaacacaaggggaacccagcctaaatgaagagcaggacaaaaggttcgtctgcaaacactccatggtagacagaggatggggaaatggatgtggactatttggaaagggaggcattgtgacctgtgctatgttcagatgcaaaaagaacatggaaggaaaagttgtgcaaccagaaaacttggaatacaccattgtgataacacctcactcaggggaagagcatgcagtcggaaatgacacaggaaaacatggcaaggaaatcaaaataacaccacagagttccatcacagaagcagaattgacaggttatggcactgtcacaatggagtgctctccaagaacgggcctcgacttcaatgagatggtgttgctgcagatggaaaataaagcttggctggtgcacaggcaatggttcctagacctgccgttaccatggttgcccggagcggacacacaagggtcaaattggatacagaaagagacattggtcactttcaaaaatccccatgcgaagaaacaggatgttgttgttttaggatcccaagaaggggccatgcacacagcacttacaggggccacagaaatccaaatgtcatcaggaaacttactcttcacaggacatctcaagtgcaggctgagaatggacaagctacagctcaaaggaatgtcatactctatgtgcacaggaaagtttaaagttgtgaaggaaatagcagaaacacaacatggaacaatagttatcagagtgcaatatgaaggggacggctctccatgcaagatcccttttgagataatggatttggaaaaaagacatgtcttaggtcgcctgattacagtcaacccaattgtgacagaaaaagatagcccagtcaacatagaagcagaacctccattcggagacagctacatcatcataggagtagagccgggacaactgaagctcaactggtttaagaaaggaagttctatcggccaaatgtttgagacaacaatgaggggggcgaagagaatggccattttaggtgacacagcctgggattttggatccttgggaggagtgtttacatctataggaaaggctctccaccaagtctttggagcaatctatggagctgccttcagtggggtttcatggactatgaaaatcctcataggagtcattatcacatggataggaatgaattcacgcagcacctcactgtctgtgacactagtattggtgggaattgtgacactgtatttgggagtcatggtgcaggccgatagtggttgcgttgtgagctggaaaaacaaagaactgaaatgtggcagtgggattttcatcacagacaacgtgcacacatggacagaacaatacaagttccaaccagaatccccttcaaaactagcttcagctatccagaaagcccatgaagagggcatttgtggaatccgctcagtaacaagactggagaatctgatgtggaaacaaataacaccagaattgaatcacattctatcagaaaatgaggtgaagttaactattatgacaggagacatcaaaggaatcatgcaggcaggaaaacgatctctgcggcctcagcccactgagctgaagtattcatggaaaacatggggcaaagcaaaaatgctctctacagagtctcataaccagacctttctcattgatggccccgaaacagcagaatgccccaacacaaatagagcttggaattcgttggaagttgaagactatggctttggagtattcaccaccaatatatggctaaaattgaaagaaaaacaggatgtattctgcgactcaaaactcatgtcagcggccataaaagacaacagagccgtccatgccgatatgggttattggatagaaagtgcactcaatgacacatggaagatagagaaagcctctttcattgaagttaaaaactgccactggccaaaatcacacaccctctggagcaatggagtgctagaaagtgagatgataattccaaagaatctcgctggaccagtgtctcaacacaactatagaccaggctaccatacacaaataacaggaccatggcatctaggtaagcttgagatggactttgatttctgtgatggaacaacagtggtagtgactgaggactgcggaaatagaggaccctctttgagaacaaccactgcctctggaaaactcataacagaatggtgctgccgatcttgcacattaccaccgctaagatacagaggtgaggatgggtgctggtacgggatggaaatcagaccattgaaggagaaagaagagaatttggtcaactccttggtcacagctggacatgggcaggtcgacaacttttcactaggagtcttgggaatggcattgttcctggaggaaatgcttaggacccgagtaggaacgaaacatgcaatactactagttgcagtttcttttgtgacattgatcacagggaacatgtcctttagagacctgggaagagtgatggttatggtaggcgccactatgacggatgacataggtatgggcgtgacttatcttgccctactagcagccttcaaagtcagaccaacttttgcagctggactactcttgagaaagctgacctccaaggaattgatgatgactactataggaattgtactcctctcccagagcaccataccagagaccattcttgagttgactgatgcgttagccttaggcatgatggtcctcaaaatggtgagaaatatggaaaagtatcaattggcagtgactatcatggctatcttgtgcgtcccaaacgcagtgatattacaaaacgcatggaaagtgagttgcacaatattggcagtggtgtccgtttccccactgctcttaacatcctcacagcaaaaaacagattggataccattagcattgacgatcaaaggtctcaatccaacagctatttttctaacaaccctctcaagaaccagcaagaaaaggagctggccattaaatgaggctatcatggcagtcgggatggtgagcattttagccagttctctcctaaaaaatgatattcccatgacaggaccattagtggctggagggctcctcactgtgtgctacgtgctcactggacgatcggccgatttggaactggagagagcagccgatgtcaaatgggaagaccaggcagagatatcaggaagcagtccaatcctgtcaataacaatatcagaagatggtagcatgtcgataaaaaatgaagaggaagaacaaacactgaccatactcattagaacaggattgctggtgatctcaggactttttcctgtatcaataccaatcacggcagcagcatggtacctgtgggaagtgaagaaacaacgggccggagtattgtgggatgttccttcacccccacccatgggaaaggctgaactggaagatggagcctatagaattaagcaaaaagggattcttggatattcccagatcggagccggagtttacaaagaaggaacattccatacaatgtggcatgtcacacgtggcgctgttctaatgcataaaggaaagaggattgaaccatcatgggcggacgtcaagaaagacctaatatcatatggaggaggctggaagttagaaggagaatggaaggaaggagaagaagtccaggtattggcactggagcctggaaaaaatccaagagccgtccaaacgaaacctggtcttttcaaaaccaacgccggaacaataggtgctgtatctctggacttttctcctggaacgtcaggatctccaattatcgacaaaaaaggaaaagttgtgggtctttatggtaatggtgttgttacaaggagtggagcatatgtgagtgctatagcccagactgaaaaaagcattgaagacaacccagagatcgaagatgacattttccgaaagagaagactgaccatcatggacctccacccaggagcgggaaagacgaagagataccttccggccatagtcagagaagctataaaacggggtttgagaacattaatcttggcccccactagagttgtggcagctgaaatggaggaagcccttagaggacttccaataagataccagaccccagccatcagagctgagcacaccgggcgggagattgtggacctaatgtgtcatgccacatttaccatgaggctgctatcaccagttagagtgccaaactacaacctgattatcatggacgaagcccatttcacagacccagcaagtatagcagctagaggatacatctcaactcgagtggagatgggtgaggcagctgggatttttatgacagccactcccccgggaagcagagacccatttcctcagagcaatgcaccaatcatagatgaagaaagagaaatccctgaacgttcgtggaattccggacatgaatgggtcacggattttaaagggaagactgtttggttcgttccaagtataaaagcaggaaatgatatagcagcttgcctgaggaaaaatggaaagaaagtgatacaactcagtaggaagacctttgattctgagtatgtcaagactagaaccaatgattgggacttcgtggttacaactgacatttcagaaatgggtgccaatttcaaggctgagagggttatagaccccagacgctgcatgaaaccagtcatactaacagatggtgaagagcgggtgattctggcaggacctatgccagtgacccactctagtgcagcacaaagaagagggagaataggaagaaatccaaaaaatgagaatgaccagtacatatacatgggggaacctctggaaaatgatgaagactgtgcacactggaaagaagctaaaatgctcctagataacatcaacacgccagaaggaatcattcctagcatgttcgaaccagagcgtgaaaaggtggatgccattgatggcgaataccgcttgagaggagaagcaaggaaaacctttgtagacttaatgagaagaggagacctaccagtctggttggcctacagagtggcagctgaaggcatcaactacgcagacagaaggtggtgttttgatggagtcaagaacaaccaaatcctagaagaaaacgtggaagttgaaatctggacaaaagaaggggaaaggaagaaattgaaacccagatggttggatgctaggatctattctgacccactggcgctaaaagaatttaaggaatttgcagccggaagaaagtctctgaccctgaacctaatcacagaaatgggtaggctcccaaccttcatgactcagaaggcaagagacgcactggacaacttagcagtgctgcacacggctgaggcaggtggaagggcgtacaaccatgctctcagtgaactgccggagaccctggagacattgcttttactgacacttctggctacagtcacgggagggatctttttattcttgatgagcggaaggggcatagggaagatgaccctgggaatgtgctgcataatcacggctagcatcctcctatggtacgcacaaatacagccacactggatagcagcttcaataatactggagttttttctcatagttttgcttattccagaacctgaaaaacagagaacaccccaagacaaccaactgacctacgttgtcatagccatcctcacagtggtggccgcaaccatggcaaacgagatgggtttcctagaaaaaacgaagaaagatctcggattgggaagcattgcaacccagcaacccgagagcaacatcctggacatagatctacgtcctgcatcagcatggacgctgtatgccgtggccacaacatttgttacaccaatgttgagacatagcattgaaaattcctcagtgaatgtgtccctaacagctatagccaaccaagccacagtgttaatgggtctcgggaaaggatggccattgtcaaagatggacatcggagttccccttctcgccattggatgctactcacaagtcaaccccataactctcacagcagctcttttcttattggtagcacattatgccatcatagggccaggactccaagcaaaagcaaccagagaagctcagaaaagagcagcggcgggcatcatgaaaaacccaactgtcgatggaataacagtgattgacctagatccaataccttatgatccaaagtttgaaaagcagttgggacaagtaatgctcctagtcctctgcgtgactcaagtattgatgatgaggactacatgggctctgtgtgaggctttaaccttagctaccgggcccatctccacattgtgggaaggaaatccagggaggttttggaacactaccattgcggtgtcaatggctaacatttttagagggagttacttggccggagctggacttctcttttctattatgaagaacacaaccaacacaagaaggggaactggcaacataggagagacgcttggagagaaatggaaaagccgattgaacgcattgggaaaaagtgaattccagatctacaagaaaagtggaatccaggaagtggatagaaccttagcaaaagaaggcattaaaagaggagaaacggaccatcacgctgtgtcgcgaggctcagcaaaactgagatggttcgttgagagaaacatggtcacaccagaagggaaagtagtggacctcggttgtggcagaggaggctggtcatactattgtggaggactaaagaatgtaagagaagtcaaaggcctaacaaaaggaggaccaggacacgaagaacccatccccatgtcaacatatgggtggaatctagtgcgtcttcaaagtggagttgacgttttcttcatcccgccagaaaagtgtgacacattattgtgtgacataggggagtcatcaccaaatcccacagtggaagcaggacgaacactcagagtccttaacttagtagaaaattggttgaacaacaacactcaattttgcataaaggttctcaacccatatatgccctcagtcatagaaaaaatggaagcactacaaaggaaatatggaggagccttagtgaggaatccactctcacgaaactccacacatgagatgtactgggtatccaatgcttccgggaacatagtgtcatcagtgaacatgatttcaaggatgttgatcaacagatttacaatgagatacaagaaagccacttacgagccggatgttgacctcggaagcggaacccgtaacatcgggattgaaagtgagataccaaacctagatataattgggaaaagaatagaaaaaataaagcaagagcatgaaacatcatggcactatgaccaagaccacccatacaaaacgtgggcataccatggtagctatgaaacaaaacagactggatcagcatcatccatggtcaacggagtggtcaggctgctgacaaaaccttgggacgtcgtccccatggtgacacagatggcaatgacagacacgactccatttggacaacagcgcgtttttaaagagaaagtggacacgagaacccaagaaccgaaagaaggcacgaagaaactaatgaaaataacagcagagtggctttggaaagaattagggaagaaaaagacacccaggatgtgcaccagagaagaattcacaagaaaggtgagaagcaatgcagccttgggggccatattcactgatgagaacaagtggaagtcggcacgtgaggctgttgaagatagtaggttttgggagctggttgacaaggaaaggaatctccatcttgaaggaaagtgtgaaacatgtgtgtacaacatgatgggaaaaagagagaagaagctaggggaattcggcaaggcaaaaggcagcagagccatatggtacatgtggcttggagcacgcttcttagagtttgaagccctaggattcttaaatgaagatcactggttctccagagagaactccctgagtggagtggaaggagaagggctgcacaagctaggttacattctaagagacgtgagcaagaaagagggaggagcaatgtatgccgatgacaccgcaggatgggatacaagaatcacactagaagacctaaaaaatgaagaaatggtaacaaaccacatggaaggagaacacaagaaactagccgaggccattttcaaactaacgtaccaaaacaaggtggtgcgtgtgcaaagaccaacaccaagaggcacagtaatggacatcatatcgagaagagaccaaagaggtagtggacaagttggcacctatggactcaatactttcaccaatatggaagcccaactaatcagacagatggagggagaaggagtctttaaaagcattcagcacctaacaatcacagaagaaatcgctgtgcaaaactggttagcaagagtggggcgcgaaaggttatcaagaatggccatcagtggagatgattgtgttgtgaaacctttagatgacaggttcgcaagcgctttaacagctctaaatgacatgggaaagattaggaaagacatacaacaatgggaaccttcaagaggatggaatgattggacacaagtgcccttctgttcacaccatttccatgagttaatcatgaaagacggtcgcgtactcgttgttccatgtagaaaccaagatgaactgattggcagagcccgaatctcccaaggagcagggtggtctttgcgggagacggcctgtttggggaagtcttacgcccaaatgtggagcttgatgtacttccacagacgcgacctcaggctggcggcaaatgctatttgctcggcagtaccatcacattgggttccaacaagtcgaacaacctggtccatacatgctaaacatgaatggatgacaacggaagacatgctgacagtctggaacagggtgtggattcaagaaaacccatggatggaagacaaaactccagtggaatcatgggaggaaatcccatacttggggaaaagagaagaccaatggtgcggctcattgattgggttaacaagcagggccacctgggcaaagaacatccaagcagcaataaatcaagttagatcccttataggcaatgaagaatacacagattacatgccatccatgaaaagattcagaagagaagaggaagaagcaggagttctgtggtagaaagcaaaactaacatgaaacaaggctagaagtcaggtcggattaagccatagtacggaaaaaactatgctacctgtgagccccgtccaaggacgttaaaagaagtcaggccatcataaatgccatagcttgagtaaactatgcagcctgtagctccacctgagaaggtgtaaaaaatccgggaggccacaaaccatggaagctgtacgcatggcgtagtggactagcggttagaggagacccctcccttacaaatcgcagcaacaatgggggcccaaggcgagatgaagctgtagtctcgctggaaggactagaggttagaggagacccccccgaaacaaaaaacagcatattgacgctgggaaagaccagagatcctgctgtctcctcagcatcattccaggcacagaacgccagaaaatggaatggtgctgttgaatcaacaggttct

SEQ ID NO: 225 - DNA, 10707 bp, unidentified
  source 1..10707: mol_type = genomic DNA; note = Dengue Virus
agttgttagtctacgtggaccgacaagaacagtttcgactcggaagcttgcttaacgtagtgctgacagttttttattagagagcagatctctgatgaacaaccaacggaagaagacgggaaaaccgtctatcaatatgctgaaacgcgtgagaaaccgtgtgtcaactggatcacagttggcgaagagattctcaaaaggactgctgaacggccagggaccaatgaaattggttatggcgttcatagctttcctcagatttctagccattccaccaacagcaggagtcttggctagatggggaaccttcaagaagtcgggggccattaaggtcctgaaaggcttcaagaaggagatctcaaacatgctgagcataatcaaccaacggaaaaagacatcgctctgtctcatgatgatattgccagcagcacttgctttccacttgacttcacgagatggagagccgcgcatgattgtggggaagaatgaaagaggtaaatccctactttttaagacagcctctggaatcaacatgtgcacactcatagccatggatttgggagagatgtgtgatgacacggtcacttacaaatgcccccacattaccgaagtggaacctgaagacattgactgctggtgcaaccttacatcaacatgggtgacttatggaacgtgcaatcaagctggagagcatagacgcgacaagagatcagtggcgttagctccccatgtcggcatgggactggacacacgcacccaaacctggatgtcggctgaaggagcttggagacaagtcgagaaggtagagacatgggcccttaggcacccagggttcaccatactagccctatttctcgcccattacataggcacttccctgacccagaaggtggttattttcatattattaatgctggtcaccccatccatgacaatgagatgtgtgggagtaggaaacagagattttgtggaagggctatcaggagctacgtgggttgacgtggtgctcgagcacggggggtgtgtgactaccatggctaagaacaagcccacgctggatatagagcttcagaagaccgaggccacccaactggcgaccctaaggaagctatgcattgaggggaaaattaccaacataacaactgactcaagatgtcctacccaaggggaagcggttttgcctgaggagcaggaccagaactacgtgtgtaagcatacatacgtagacagaggttgggggaacggttgtggtttgtttggcaaaggaagcttggtaacatgtgcgaaatttcaatgcctggaaccaatagagggaaaagtggtgcaatatgagaacctcaaatacaccgtcatcattacagtgcacacaggagaccaacaccaggtgggaaatgaaacgcaaggagtcacggctgagataacacctcaggcatcaaccactgaagccatcttgcctgaatatggaacccttgggctagaatgctcaccacggacaggtttggatttcaatgaaatgatcttactaacaatgaagaacaaagcatggatggtacatagacaatggttctttgacctacctctaccatgggcatcaggagctacaacagaaacaccaacctggaacaggaaggagcttcttgtgacattcaaaaacgcacatgcgaaaaaacaagaagtagttgtccttggatcgcaagagggagcaatgcataccgcactgacaggagctacagaaatccaaaactcaggaggcacaagcattttcgcggggcacttaaaatgtagacttaagatggacaaattggaactcaaggggatgagctatgcaatgtgcacgaatacctttgtgttgaagaaagaagtctcagaaacgcagcacgggacaatactcattaaggttgagtacaaaggggaagatgcaccttgcaagattcccttttccacagaggatggacaagggaaagctcataatggcagactgatcacagccaaccctgtggtgactaagaaggaggagcctgtcaatattgaggctgaacctccttttggggaaagcaatatagtaattggaattggagacaacgccttgaaaatcaactggtacaagaaggggagctcgattgggaagatgttcgaggccactgaaaggggtgcaaggcgcatggccatcttgggagacacagcttgggactttggatcagtgggtggtgttctgaactcattaggcaaaatggtgcaccaaatatttggaagtgcttatacagccctgttcagtggagtctcttgggtgatgaaaattggaataggtgtcctcttgacttggatagggttgaattcaaaaaacacatccatgtcattttcatgcattgcgataggaatcattacactctatctgggagctgtggtacaagctgacatggggtgtgtcataaactggaagggcaaagaactcaaatgtggaagcggaattttcgtcaccaatgaggtccatacctggacagagcaatacaaattccaagcagactccccaaaaagattggcaacagccattgcaggcgcctgggagaatggagtgtgtggaattaggtcaacaaccagaatggagaatctcttgtggaagcaaatagccaatgaactgaactacatattatgggaaaacaatatcaaattaacggtagttgtgggcgatacacttggggtcttagagcaagggaaaagaacactaacaccacaacccatggagctaaaatactcatggaaaacgtggggaaaggcaaaaatagtgacagctgaaacacaaaattcctctttcataatagacgggccaaacacaccggagtgtccaagtgcctcaagagcatggaatgtgtgggaggtggaagattacgggttcggagtcttcacaaccaacatatggctgaaactccgagaggtctacacccaactatgtgaccataggctaatgtcggcagctgtcaaggatgagagggccgtgcatgccgacatgggctactggatagaaagccaaaagaatggaagttggaagctagaaaaagcatccctcatagaggtaaaaacctgcacatggccaaaatcacacactctctggactaatggtgtgctagagagtgacatgatcatcccaaagagtctagctggtcctatctcacaacacaactacaggcccgggtaccacacccaaacggcaggaccctggcacttaggaaaattggagctggacttcaactactgtgaaggaacaacagttgtcatcacagaaagctgtgggacaagaggcccatcattgagaacaacaacagtgtcagggaagttgatacacgaatggtgttgccgctcgtgcacacttccccccctgcgatacatgggagaagacggctgctggtatggcatggaaatcagacccatcagtgagaaagaagagaacatggtaaagtctttagtctcagcgggaagtggaaaggtggacaacttcacaatgggtgtcttgtgtttggcaatcctctttgaagaggtgttgagaggaaaatttgggaagaaacacatgattgcaggggttttctttacgtttgtgctccttctctcagggcaaataacatggagagacatggcgcacacactaataatgatcgggtccaacgcctctgacaggatgggaatgggcgtcacctacctagctctaattgcaacatttaaaatccagccattcttggctttgggatttttcctaagaaagctgacatctagagaaaatttattgttaggagttgggttggccatggcaacaacgttacaactgccagaggacattgaacaaatggcaaatggagtcgctctggggctcatggctcttaaactgataacacaatttgaaacataccaattgtggacggcattagtctccttaacgtgttcaaacacaatttttacgttgactgttgcctggagaacagccactctgattttggccggagtttcgcttttaccagtgtgccagtcttcaagcatgaggaaaacagattggctcccaatgacagtggcagctatgggagttccaccccttccactttttatttttagcttgaaagacacactcaaaaggagaagctggccactgaatgaaggggtgatggctgttgggcttgtgagcattctggccagttctctccttagaaatgatgtgcccatggctggaccattagtggccgggggcttgctgatagcgtgctacgtcataactggcacgtcagcggacctcactgtagaaaaagccccagatgtaacatgggaggaagaggctgagcagacaggagtgtcccacaacttaatgatcacagttgatgatgatggaacaatgagaataaaagatgatgagactgagaacatcctaacagtgcttttaaaaacagcattactaatagtatcaggcatttttccatactccatacccgcaacattgttggtctggcacacttggcaaaaacaaacccaaagatccggcgttttatgggacgtacccagccccccagagacacagaaagcagaactggaagaaggggtttataggatcaaacagcaaggaatttttgggaaaacccaagtaggggttggagtacagaaagaaggagtcttccacaccatgtggcacgtcacaagaggggcagtgttgacacataatgggaaaagactggaaccaaactgggctagtgtgaaaaaagatctgatttcatatggaggaggatggagactgagcgcacaatggcaaaagggggaggaggtgcaggttattgccgtagagccagggaagaacccaaagaactttcaaaccacgccaggcactttccagactactacaggggaaataggagcaattgcactggatttcaagcctggaacttcaggatctcctatcataaatagagagggaaaggtagtgggactgtatggcaatggagtggttacaaagaatggtggctatgtcagcggaatagcgcaaacaaatgcagaaccagatggaccgacaccagagttggaagaagagatgttcaaaaagcgaaacctgaccataatggatcttcatcctgggtcaggaaagacacggaaataccttccagctattgtcagagaggcaatcaagagacgtttaagaaccttaattttggcaccgacaagggtggttgcagctgagatggaagaagcattgaaagggctcccaataaggtaccaaacaacagcaacaaaatctgaacacacaggaagagagattgttgatctaatgtgccacgcaacgttcacaatgcgtttgctgtcaccagttagggttccaaattacaacttgataataatggatgaggcccatttcacagacccagccagtatagcggctagagggtacatatcaactcgtgttggaatgggagaggcagccgcaatcttcatgacagcaacaccccctggaacagctgatgcctttcctcagagcaacgctccaattcaagatgaagaaagggacataccagaacgctcatggaattcaggcaatgaatggattaccgacttcgctgggaaaacggtgtggtttgtccctagcattaaagccggaaatgacatagcaaactgcttgcgaaaaaacgggaaaaaagtcattcaacttagtaggaagacttttgacacagaatatcagaagactaaactgaatgattgggactttgtggtgacaactgacatttcagaaatgggggccaatttcaaagcagatagagtgatcgacccaagaagatgtctcaaaccagtgatcttgacagatggaccagagcgggtgatcctggccggaccaatgccagtcaccgcggcgagtgctgcgcaaaggagagggagagttggcaggaacccacaaaaagagaatgaccagtacatattcacgggccagcctctcaacaatgatgaagaccatgctcactggacagaagcaaaaatgctgctggacaacatcaacacaccagaagggattataccagctctctttgaaccagaaagggagaagtcagccgccatagacggtgagtatcgcctgaagggtgagtccaggaagactttcgtggaactcatgaggaggggtgaccttccagtttggttagcccataaagtagcatcagaaggaatcaaatacacagatagaaaatggtgctttgatgggcaacgcaataatcaaattttagaggagaacatggatgtggaaatttggacaaaggaaggagaaaagaaaaaattgagacctaggtggcttgatgcccgcacttattcagatccattggcactcaaggaattcaaggactttgcggctggcagaaagtcaatcgcccttgatcttgtgacagaaataggaagagtgccttcacatctagcccacagaacaagaaacgctctggacaatctggtgatgctgcatacgtcagaagatggcggtagggcttacaggcatgcggtggaggaactaccagaaacaatggaaacactcctactcttgggactaatgatcttgttgacaggtggagcaatgcttttcttgatatcaggtaaagggattggaaagacttcaataggactcatttgtgtaatcgcttccagcggcatgttgtggatggccgaagttccactccaatggatcgcgtcggctatagtcctggagttttttatgatggtgttgctcataccagaaccagaaaagcagagaaccccccaagacaaccaactcgcatatgtcgtgataggcatacttacattggctgcaacaatagcagccaatgaaatgggactgctggaaaccacaaagagagacttaggaatgtctaaggagccaggtgttgtttctccaaccagctatttggatgtggacttgcacccagcatcagcctggacattgtacgccgtggccactacagtaataacaccaatgttaagacataccatagagaattctacagcaaatgtgtccctggcagctatagccaaccaggcagtggtcctgatgggtttggacaaaggatggccaatatcaaaaatggacttaggcgtgccactactggcactgggttgctattcacaagtgaacccactgactctaactgcggcagtacttttgctaatcacacattatgctatcataggtccaggattgcaagcaaaagccacccgtgaagctcagaaaaggacagctgctggaataatgaagaatccaacagtggatgggataatgacaatagacctagattctgtaatatttgattcaaaatttgaaaaacaactgggacaggttatgctcctggttttgtgcgcagtccaactcttgctaatgagaacatcatgggccttgtgtgaagctttaactctagctacaggaccaataacaacactctgggaaggatcacctggtaagttctggaacaccacgatagctgtttccatggcgaacatttttagagggagctatttagcaggagctgggcttgctttttctattatgaaatcagttggaacaggaaaaagaggaacaggctcacaaggtgaaactttaggagaaaaatggaaaaagaaattaaatcaattatcccggaaagagtttgacctttacaagaaatctggaatcactgaagtggatagaacagaagccaaagaagggttgaaaagaggagagacaacacatcatgccgtgtcccgaggtagcgcaaaacttcaatggtttgtggaaagaaacatggtcgttcccgaaggaagagtcatagacttgggctgtggaagaggaggctggtcatattactgtgcaggactgaaaaaagtcacagaagtgcgaggatacacaaaaggcggtccaggacacgaagaaccagtacctatgtctacatatggatggaacatagttaagttaatgagcggaaaggatgtgttctatctcccacctgaaaagtgtgataccctgttgtgtgacattggagaatcttcaccaagcccaacagtggaagagagcagaactataagagttttgaagatggttgaaccatggctaaaaaacaaccagttttgcattaaagttttgaacccttacatgccaactgtgattgagcacctagaaagactacaaaggaaacatggaggaatgcttgtgagaaatccactttcacgaaactccacgcacgaaatgtactggatatctaatggcacaggtaacattgtctcttcagtcaacatggtgtctagattgctactgaacaggttcacgatgacacacaggagacccaccatagagaaagatgtggatttaggagcaggaactcgacatgttaatgcggaaccagaaacacccaacatggatgtcattggggaaagaataaaaaggatcaaggaggagcataattcaacatggcactatgatgacgaaaacccctacaaaacgtgggcttaccatggatcctatgaagtcaaagccacaggctcagcctcctccatgataaatggagtcgtgaaactcctcaccaaaccatgggatgtggtgcccatggtgacacagatggcaatgacagacacaactccatttggccagcagagagtctttaaagagaaagtggacaccaggacgcccaggcccatgccagggacaagaaaggctatggagatcacagcggagtggctctggagaaccctgggaaggaacaaaagacccagattatgcacaagggaagagtttacaaaaaaggtcagaactaacgcagccatgggcgccgttttcacagaggagaaccaatgggacagtgcgaaagctgctgttgaggatgaagaattttggaaacttgtggacagagaacgtgaactccacaaattgggcaaatgtggaagctgcgtttataacatgatgggcaagagagagaaaaaacttggagagtttggcaaagcaaaaggcagtagagctatatggtacatgtggttgggagccaggtaccttgagttcgaagcccttggattcttaaatgaagaccactggttctcgcgtgaaaactcttacagtggagtagaaggagaaggactgcacaagctaggctacatattaagggacatttccaagatacccggaggagccatgtatgctgatgacacagctggttgggacacaagaataacagaagatgacctgcacaatgaggaaaagatcatacagcaaatggaccctgaacacaggcagttagcgaacgctatattcaagctcacataccaaaacaaagtggtcaaagttcaacgaccgactccaacgggcacggtaatggatattatatctaggaaagaccaaaggggcagtggacaactgggaacttatggcctgaatacattcaccaacatggaagcccagttagtcagacaaatggaaggagaaggtgtgctgacaaaggcagacctcgagaaccctcatctgctagagaagaaaatcacacaatggttggaaaccaaaggagtggagaggttaaaaagaatggccattagcggggatgattgcgtggtgaaaccaatcgatgacaggttcgctaatgccctgcttgctttgaacgatatgggaaaggttcggaaagacatacctcaatggcagccatcaaagggatggcatgattggcaacaggttcctttctgctcccaccactttcatgaattgatcatgaaagatggaagaaagttggtggttccctgcagaccccaggacgaactaataggaagagcaagaatctctcaaggagcgggatggagccttagagaaactgcatgtctggggaaagcctacgcccaaatgtggagtctcatgtattttcacagaagagatctcagattagcatccaacgccatatgttcagcagtaccagtccactgggttcccacaagtagaacgacatggtctattcatgctcaccatcagtggatgactacagaagacatgcttactgtttggaacagggtgtggatagaggaaaatccatggatggaagacaaaactccagttacaacttgggaaaatgttccatatctaggaaagagagaagaccaatggtgtggatcacttattggtctcacttccagagcaacctgggcccagaacatacccacagcaattcaacaggtgagaagccttataggcaatgaagagttcctggactacatgccttcaatgaagagattcaggaaggaagaggagtcggagggagccatttggtaaacgtaggaagtggaaaagaggctaactgtcaggccaccttaagccacagtacggaagaagctgtgctgcctgtgagccccgtccaaggacgttaaaagaagaagtcaggccccaaagccacggtttgagcaaaccgtgctgcctgtagctccgtcgtggggacgtaaaacctgggaggctgcaaactgtggaagctgtacgcacggtgtagcagactagcggttagaggagacccctcccatgacacaacgcagcagcggggcccgagcactgagggaagctgtacctccttgcaaaggactagaggttagaggagaccccccgcaaataaaaacagcatattgacgctgggagagaccagagatcctgctgtctcctcagcatcattccaggcacagaacgccagaaaatggaatggtgctgttgaatcaacaggttct

SEQ ID NO: 226 - DNA, 10649 bp, unidentified
  source 1..10649: mol_type = genomic DNA; note = Dengue Virus
agttgttagtctgtgtggaccgacaaggacagttccaaatcggaagcttgcttaacacagttctaacagtttgtttgaatagagagcagatctctggaaaaatgaaccaacgaaaaaaggtggttagaccacctttcaatatgctgaaacgcgagagaaaccgcgtatcaacccctcaagggttggtgaagagattctcaaccggacttttttctgggaaaggacccttacggatggtgctagcattcatcacgtttttgcgagtcctttccatcccaccaacagcagggattctgaagagatggggacagttgaagaaaaataaggccatcaagatactgattggattcaggaaggagataggccgcatgctgaacatcttgaacgggagaaaaaggtcaacgataacattgctgtgcttgattcccaccgtaatggcgttttccctcagcacaagagatggcgaacccctcatgatagtggcaaaacatgaaagggggagacctctcttgtttaagacaacagaggggatcaacaaatgcactctcattgccatggacttgggtgaaatgtgtgaggacactgtcacgtataaatgccccctactggtcaataccgaacctgaagacattgattgctggtgcaacctcacgtctacctgggtcatgtatgggacatgcacccagagcggagaacggagacgagagaagcgctcagtagctttaacaccacattcaggaatgggattggaaacaagagctgagacatggatgtcatcggaaggggcttggaagcatgctcagagagtagagagctggatactcagaaacccaggattcgcgctcttggcaggatttatggcttatatgattgggcaaacaggaatccagcgaactgtcttctttgtcctaatgatgctggtcgccccatcctacggaatgcgatgcgtaggagtaggaaacagagactttgtggaaggagtctcaggtggagcatgggtcgacctggtgctagaacatggaggatgcgtcacaaccatggcccagggaaaaccaaccttggattttgaactgactaagacaacagccaaggaagtggctctgttaagaacctattgcattgaagcctcaatatcaaacataactacggcaacaagatgtccaacgcaaggagagccttatctgaaagaggaacaggaccaacagtacatttgccggagagatgtggtagacagagggtggggcaatggctgtggcttgtttggaaaaggaggagttgtgacatgtgcgaagttttcatgttcggggaagataacaggcaatttggtccaaattgagaaccttgaatacacagtggttgtaacagtccacaatggagacacccatgcagtaggaaatgacacatccaatcatggagttacagccatgataactcccaggtcaccatcggtggaagtcaaattgccggactatggagaactaacactcgattgtgaacccaggtctggaattgactttaatgagatgattctgatgaaaatgaaaaagaaaacatggctcgtgcataagcaatggtttttggatctgcctcttccatggacagcaggagcagacacatcagaggttcactggaattacaaagagagaatggtgacatttaaggttcctcatgccaagagacaggatgtgacagtgctgggatctcaggaaggagccatgcattctgccctcgctggagccacagaagtggactccggtgatggaaatcacatgtttgcaggacatcttaagtgcaaagtccgtatggagaaattgagaatcaagggaatgtcatacacgatgtgttcaggaaagttttcaattgacaaagagatggcagaaacacagcatgggacaacagtggtgaaagtcaagtatgaaggtgctggagctccgtgtaaagtccccatagagataagagatgtaaacaaggaaaaagtggttgggcgtatcatctcatccacccctttggctgagaataccaacagtgtaaccaacatagaattagaacccccctttggggacagctacatagtgataggtgttggaaacagcgcattaacactccattggttcaggaaagggagttccattggcaagatgtttgagtccacatacagaggtgcaaaacgaatggccattctaggtgaaacagcttgggattttggttccgttggtggactgttcacatcattgggaaaggctgtgcaccaggtttttggaagtgtgtatacaaccatgtttggaggagtctcatggatgattagaatcctaattgggttcttagtgttgtggattggcacgaactcgaggaacacttcaatggctatgacgtgcatagctgttggaggaatcactctgtttctgggcttcacagttcaagcagacatgggttgtgtggcgtcatggagtgggaaagaattgaagtgtggaagcggaatttttgtggttgacaacgtgcacacttggacagaacagtacaaatttcaaccagagtccccagcgagactagcgtctgcaatattaaatgcccacaaagatggggtctgtggaattagatcaaccacgaggctggaaaatgtcatgtggaagcaaataaccaacgagctaaactatgttctctgggaaggaggacatgacctcactgtagtggctggggatgtgaagggggtgttgaccaaaggcaagagagcactcacacccccagtgagtgatctgaaatattcatggaagacatggggaaaagcaaaaatcttcaccccagaagcaagaaatagcacatttttaatagacggaccagacacctctgaatgccccaatgaacgaagagcatggaactctcttgaggtggaagactatggatttggcatgttcacgaccaacatatggatgaaattccgagaaggaagttcagaagtgtgtgaccacaggttaatgtcagctgcaattaaagatcagaaagctgtgcatgctgacatgggttattggatagagagctcaaaaaaccagacctggcagatagagaaagcatctcttattgaagtgaaaacatgtctgtggcccaagacccacacactgtggagcaatggagtgctggaaagccagatgctcattccaaaatcatatgcgggccctttttcacagcacaattaccgccagggctatgccacgcaaaccgtgggcccatggcacttaggcaaattagagatagactttggagaatgccccggaacaacagtcacaattcaggaggattgtgaccatagaggcccatctttgaggaccaccactgcatctggaaaactagtcacgcaatggtgctgccgctcctgcacgatgcctcccttaaggttcttgggagaagatgggtgctggtatgggatggagattaggcccttgagtgaaaaagaagagaacatggtcaaatcacaggtgacggccggacagggcacatcagaaactttttctatgggtctgttgtgcctgaccttgtttgtggaagaatgcttgaggagaagagtcactaggaaacacatgatattagttgtggtgatcactctttgtgctatcatcctgggaggcctcacatggatggacttactacgagccctcatcatgttgggggacactatgtctggtagaataggaggacagatccacctagccatcatggcagtgttcaagatgtcaccaggatacgtgctgggtgtgtttttaaggaaactcacttcaagagagacagcactaatggtaataggaatggccatgacaacggtgctttcaattccacatgaccttatggaactcattgatggaatatcactgggactaattttgctaaaaatagtaacacagtttgacaacacccaagtgggaaccttagctctttccttgactttcataagatcaacaatgccattggtcatggcttggaggaccattatggctgtgttgtttgtggtcacactcattcctttgtgcaggacaagctgtcttcaaaaacagtctcattgggtagaaataacagcactcatcctaggagcccaagctctgccagtgtacctaatgactcttatgaaaggagcctcaagaagatcttggcctcttaacgagggcataatggctgtgggtttggttagtctcttaggaagcgctcttttaaagaatgatgtccctttagctggcccaatggtggcaggaggcttacttctggcggcttacgtgatgagtggtagctcagcagatctgtcactagagaaggccgccaacgtgcagtgggatgaaatggcagacataacaggctcaagcccaatcgtagaagtgaagcaggatgaagatggctctttctccatacgggacgtcgaggaaaccaatatgataacccttttggtgaaactggcactgataacagtgtcaggtctctaccccttggcaattccagtcacaatgaccttatggtacatgtggcaagtgaaaacacaaagatcaggagccctgtgggacgtcccctcacccgctgccactaaaaaagccgcactgtctgaaggagtgtacaggatcatgcaaagagggttattcgggaaaactcaggttggagtagggatacacatggaaggtgtatttcacacaatgtggcatgtaacaagaggatcagtgatctgccacgagactgggagattggagccatcttgggctgacgtcaggaatgacatgatatcatacggtgggggatggaggcttggagacaaatgggacaaagaagaagacgttcaggtcctcgccatagaaccaggaaaaaatcctaaacatgtccaaacgaaacctggccttttcaagaccctaactggagaaattggagcagtaacattagatttcaaacccggaacgtctggttctcccatcatcaacaggaaaggaaaagtcatcggactctatggaaatggagtagttaccaaatcaggtgattacgtcagtgccataacgcaagccgaaagaattggagagccagattatgaagtggatgaggacatttttcgaaagaaaagattaactataatggacttacaccccggagctggaaagacaaaaagaattcttccatcaatagtgagagaagccttaaaaaggaggctacgaactttgattttagctcccacgagagtggtggcggccgagatggaagaggccctacgtggactgccaatccgttatcagaccccagctgtgaaatcagaacacacaggaagagagattgtagacctcatgtgtcatgcaaccttcacaacaagacttttgtcatcaaccagggttccaaattacaaccttatagtgatggatgaagcacatttcaccgatccttctagtgtcgcggctagaggatacatctcgaccagggtggaaatgggagaggcagcagccatcttcatgaccgcaacccctcccggagcgacagatccctttccccagagcaacagcccaatagaagacatcgagagggaaattccggaaaggtcatggaacacagggttcgactggataacagactaccaagggaaaactgtgtggtttgttcccagcataaaagctggaaatgacattgcaaattgtttgagaaagtcgggaaagaaagttatccagttgagtaggaaaacctttgatacagagtatccaaaaacgaaactcacggactgggactttgtggtcactacagacatatctgaaatgggggccaattttagagccgggagagtgatagaccctagaagatgcctcaagccagttatcctaccagatgggccagagagagtcattttagcaggtcctattccagtgactccagcaagcgctgctcagagaagagggcgaataggaaggaacccagcacaagaagacgaccaatacgttttctccggagacccactaaaaaatgatgaagatcatgcccactggacagaagcaaagatgctgcttgacaatatctacaccccagaagggatcattccaacattgtttggtccggaaagggaaaaaacccaagccattgatggagagtttcgcctcagaggggaacaaaggaagacttttgtggaattaatgaggagaggagaccttccggtgtggctgagctataaggtagcttctgctggcatttcttacgaagatcgggaatggtgcttcacaggggaaagaaataaccaaattttagaagaaaacatggaggttgaaatttggactagagagggagaaaagaaaaagctaaggccaagatggttagatgcacgtgtatacgctgaccccatggctttgaaggatttcaaggagtttgccagtggaaggaagagtataactctcgacatcctaacagagattgccagtttgccaacttacctttcctctagggccaagctcgcccttgataacatagtcatgctccacacaacagaaagaggagggagggcctatcaacacgccctgaacgaacttccggagtcactggaaacactcatgcttgtagctttactaggtgctatgacagcaggcatcttcctgtttttcatgcaagggaaaggaatagggaaattgtcaatgggtttgataaccattgcggtggctagtggcttgctctgggtagcagaaattcaaccccagtggatagcggcctcaatcatactagagttttttctcatggtactgttgataccggaaccagaaaaacaaaggaccccacaagacaatcaattgatctacgtcatattgaccattctcaccatcattggtctaatagcagccaacgagatggggctgattgaaaaaacaaaaacggattttgggttttaccaggtaaaaacagaaaccaccatcctcgatgtggacttgagaccagcttcagcatggacgctctatgcagtagccaccacaattctgactcccatgctgagacacaccatagaaaacacgtcggccaacctatctctagcagccattgccaaccaggcagccgtcctaatggggcttggaaaaggatggccgctccacagaatggacctcggtgtgccgctgttagcaatgggatgctattctcaagtgaacccaacaaccttgacagcatccttagtcatgcttttagtccattatgcaataataggcccaggattgcaggcaaaagccacaagagaggcccagaaaaggacagctgctgggatcatgaaaaatcccacagtggacgggataacagtaatagatctagaaccaatatcctatgacccaaaatttgaaaagcaattagggcaggtcatgctactagtcttgtgtgctggacaactactcttgatgagaacaacatgggctttctgtgaagtcttgactttggccacaggaccaatcttgaccttgtgggagggcaacccgggaaggttttggaacacgaccatagccgtatccaccgccaacattttcaggggaagttacttggcgggagctggactggctttttcactcataaagaatgcacaaacccctaggaggggaactgggaccacaggagagacactgggagagaagtggaagagacagctaaactcattagacagaaaagagtttgaagagtataaaagaagtggaatactagaagtggacaggactgaagccaagtctgccctgaaagatgggtctaaaatcaagcatgcagtatcaagagggtccagtaagatcagatggattgttgagagagggatggtaaagccaaaagggaaagttgtagatcttggctgtgggagaggaggatggtcttattacatggcgacactcaagaacgtgactgaagtgaaagggtatacaaaaggaggtccaggacatgaagaaccgattcccatggctacttatggttggaatttggtcaaactccattcaggggttgacgtgttctacaaacccacagagcaagtggacaccctgctctgtgatattggggagtcatcttctaatccaacaatagaggaaggaagaacattaagagttttgaagatggtggagccatggctctcttcaaaacctgaattctgcatcaaagtccttaacccctacatgccaacagtcatagaagagctggagaaactgcagagaaaacatggtgggaaccttgtcagatgcccgctgtccaggaactccacccatgagatgtattgggtgtcaggagcgtcgggaaacattgtgagctctgtgaacacaacatcaaagatgttgttgaacaggttcacaacaaggcataggaaacccacttatgagaaggacgtagatcttggggcaggaacgagaagtgtctccactgaaacagaaaaaccagacatgacaatcattgggagaaggcttcagcgattgcaagaagagcacaaagaaacctggcattatgatcaggaaaacccatacagaacctgggcgtatcatggaagctatgaagctccttcgacaggctctgcatcctccatggtgaacggggtggtaaaactgctaacaaaaccctgggatgtgattccaatggtgactcagttagccatgacagatacaaccccttttgggcaacaaagagtgttcaaagagaaggtggataccagaacaccacaaccaaaacccggtacacgaatggttatgaccacgacagccaattggctgtgggccctccttggaaagaagaaaaatcccagactgtgcacaagggaagagttcatctcaaaagttagatcaaacgcagccataggcgcagtctttcaggaagaacagggatggacatcagccagtgaagctgtgaatgacagccggttttgggaactggttgacaaagaaagggccctacaccaggaagggaaatgtgaatcgtgtgtctataacatgatgggaaaacgtgagaaaaagttaggagagtttggcagagccaagggaagccgagcaatctggtacatgtggctgggagcgcggtttctggaatttgaagccctgggttttttgaatgaagatcactggtttggcagagaaaattcatggagtggagtggaaggggaaggtctgcacagattgggatatatcctggaggagatagacaagaaggatggagacctaatgtatgctgatgacacagcaggctgggacacaagaatcactgaggatgaccttcaaaatgaggaactgatcacggaacagatggctccccaccacaagatcctagccaaagccattttcaaactaacctatcaaaacaaagtggtgaaagtcctcagacccacaccgcggggagcggtgatggatatcatatccaggaaagaccaaagaggtagtggacaagttggaacatatggtttgaacacattcaccaacatggaagttcaactcatccgccaaatggaagctgaaggagtcatcacacaagatgacatgcagaacccaaaagggttgaaagaaagagttgagaaatggctgaaagagtgtggtgtcgacaggttaaagaggatggcaatcagtggagacgattgcgtggtgaagcccctagatgagaggtttggcacttccctcctcttcttgaacgacatgggaaaggtgaggaaagacattccgcagtgggaaccatctaagggatggaaaaactggcaagaggttcctttttgctcccaccactttcacaagatctttatgaaggatggccgctcactagttgttccatgtagaaaccaggatgaactgatagggagagccagaatctcgcagggagctggatggagcttaagagaaacagcctgcctgggcaaagcttacgcccagatgtggtcgcttatgtacttccacagaagggatctgcgtttagcctccatggccatatgctcagcagttccaacggaatggtttccaacaagcagaacaacatggtcaatccacgctcatcaccagtggatgaccactgaagatatgctcaaagtgtggaacagagtgtggatagaagacaaccctaatatgactgacaagactccagtccattcgtgggaagatataccttacctagggaaaagagaggatttgtggtgtggatccctgattggactttcttccagagccacctgggcgaagaacattcatacggccataacccaggtcaggaacctgatcggaaaagaggaatacgtggattacatgccagtaatgaaaagatacagtgctccttcagagagtgaaggagttctgtaattaccaacaacaaacaccaaaggctattgaagtcaggccacttgtgccacggtttgagcaaaccgtgctgcctgtagctccgccaataatgggaggcgtaataatccccagggaggccatgcgccacggaagctgtacgcgtggcatattggactagcggttagaggagacccctcccatcactgataaaacgcagcaaaagggggcccgaagccaggaggaagctgtactcctggtggaaggactagaggttagaggagacccccccaacacaaaaacagcatattgacgctgggaaagaccagagatcctgctgtctctgcaacatcaatccaggcacagagcgccgcaagatggattggtgttgttgatccaacaggttct

SEQ ID NO: 227 - DNA, 2049 bp, synthetic construct
  misc_feature 1..2049: note = Synthetic Polynucleotide
  source 1..2049: mol_type = other DNA
atggatgctatgaaaagaggcctgtgttgtgtgttgctgttgtgcggagctgtgtttgtgtcacctttccacctgactacccgcaatggtgagccccatatgattgtgtcgcgccaggagaaggggaagtccctcctgttcaaaactgaaaacggcgtgaacatgtgtaccctgatggccatggaccttggagaactgtgcgaggacaccatcacctacaattgtccgctcctgcgccaaaacgaaccagaagatatcgactgctggtgcaattccacttcaacctgggttacctacggaacttgcaccgccacgggagaacacagaagagaaaagcgctcggtggcgctggtgcctcatgtcggaatgggactggagactcggacggagacttggatgtcctcggagggagcatggaaacatgcccaacggatcgaaacttgggtgctgaggcaccctggattcaccatcatggcagcgatcctcgcctacactataggtactacctactttcaaagggtgctgatcttcattctcctcaccgcagtggccccttcaatgaccatgaggtgcattgggatctcgaaccgggacttcgtcgaaggagtgtccggaggtagctgggtcgacatcgtcctggaacacggaagctgcgtgactactatggcgaagaacaagccaaccttggacttcgagcttatcaagaccgaggcgaagcacccggccactctgagaaagtactgcatcgaggctaagctcaccaacacgaccactgcctcgcgatgcccaactcagggagaaccgtcactgaacgaagaacaggataaacgctttgtgtgcaagcatagcatggtggatagaggctggggaaacggctgtggactcttcggaaagggtggaattgtgacgtgcgcaatgttcacttgcaagaagaatatggaagggaagatcgtccagccggagaacctggaatacactatcgtgatcaccccgcactcaggcgaggagaacgcagtgggcaacgataccgggaagcacgggaaggaaatcaaggtgaccccgcagtcgtccattaccgaggccgaactcaccggatacggcactgtgactatggaatgctcgccacggaccgggctggatttcaatgagatggtgctcttgcaaatggagaacaaagcctggctggtccaccgccagtggttcctcgacctcccccttccgtggctgccgggagctgacacccaaggatccaactggatccaaaaagaaacccttgtcacgtttaagaatccacatgccaaaaagcaggacgtggtcgtgctcggaagccaggaaggagccatgcacactgcgctgactggagcaaccgaaattcaaatgtcgagcggcaacctcctcttcactggacatctgaagtgccggctgcgcatggacaaactgcaacttaagggcatgtcatactcgatgtgtaccggcaaattcaaggtggtgaaggagatcgcggagactcagcacgggaccatcgtcatccgggtccagtatgagggtgatggttccccctgcaagatccctttcgaaatcatggatctggagaaacgtcacgtgctgggccggctgatcactgtgaatccgatcgttacggagaaagacagcccggtgaacatcgaagctgaaccgccgtttggggatagctacattatcatcggcgtggaaccaggccagctcaagttgtcgtggttcaagaaaggatccagcatcggacagatgttcgaaaccactatgcgcggagccaaacgcatggctatcctgggggacacggcctgggacttcgggtcgctgggtggtgtgttcacctccattggaaaggcgctccatcaggtgtttggtgcgatctacggcgccgcattctccggagtgtcatggaccatgaagatcctcatcggagtcgtcatcacctggatcggcatgaattctcggtccacttccttgagcgtcagcctggtgctggtcggagttgtgactctgtaccttggagtgatggtccaggcc

SEQ ID NO: 228 - DNA, 1749 bp, synthetic construct
  misc_feature 1..1749: note = Synthetic Polynucleotide
  source 1..1749: mol_type = other DNA
atggatgctatgaaaagaggcctgtgttgtgtgttgctgttgtgcggagctgtgtttgtgtcacctttccacctgactacccgcaatggtgagccccatatgattgtgtcgcgccaggagaaggggaagtccctcctgttcaaaactgaaaacggcgtgaacatgtgtaccctgatggccatggaccttggagaactgtgcgaggacaccatcacctacaattgtccgctcctgcgccaaaacgaaccagaagatatcgactgctggtgcaattccacttcaacctgggttacctacggaacttgcaccgccacgggagaacacagaagagaaaagcgctcggtggcgctggtgcctcatgtcggaatgggactggagactcggacggagacttggatgtcctcggagggagcatggaaacatgcccaacggatcgaaacttgggtgctgaggcaccctggattcaccatcatggcagcgatcctcgcctacactataggtactacctactttcaaagggtgctgatcttcattctcctcaccgcagtggccccttcaatgaccatgaggtgcattgggatctcgaaccgggacttcgtcgaaggagtgtccggaggtagctgggtcgacatcgtcctggaacacggaagctgcgtgactactatggcgaagaacaagccaaccttggacttcgagcttatcaagaccgaggcgaagcacccggccactctgagaaagtactgcatcgaggctaagctcaccaacacgaccactgcctcgcgatgcccaactcagggagaaccgtcactgaacgaagaacaggataaacgctttgtgtgcaagcatagcatggtggatagaggctggggaaacggctgtggactcttcggaaagggtggaattgtgacgtgcgcaatgttcacttgcaagaagaatatggaagggaagatcgtccagccggagaacctggaatacactatcgtgatcaccccgcactcaggcgaggagaacgcagtgggcaacgataccgggaagcacgggaaggaaatcaaggtgaccccgcagtcgtccattaccgaggccgaactcaccggatacggcactgtgactatggaatgctcgccacggaccgggctggatttcaatgagatggtgctcttgcaaatggagaacaaagcctggctggtccaccgccagtggttcctcgacctcccccttccgtggctgccgggagctgacacccaaggatccaactggatccaaaaagaaacccttgtcacgtttaagaatccacatgccaaaaagcaggacgtggtcgtgctcggaagccaggaaggagccatgcacactgcgctgactggagcaaccgaaattcaaatgtcgagcggcaacctcctcttcactggacatctgaagtgccggctgcgcatggacaaactgcaacttaagggcatgtcatactcgatgtgtaccggcaaattcaaggtggtgaaggagatcgcggagactcagcacgggaccatcgtcatccgggtccagtatgagggtgatggttccccctgcaagatccctttcgaaatcatggatctggagaaacgtcacgtgctgggccggctgatcactgtgaatccgatcgttacggagaaagacagcccggtgaacatcgaagctgaaccgccgtttggggatagctacattatcatcggcgtggaaccaggccagctcaagttgtcgtggttcaagaaagga

SEQ ID NO: 229 - DNA, 2544 bp, synthetic construct
  misc_feature 1..2544: note = Synthetic Polynucleotide
  source 1..2544: mol_type = other DNA
atggatgctatgaaaagaggcctgtgttgtgtgttgctgttgtgcggagctgtgtttgtgtcacctttccacctgactacccgcaatggtgagccccatatgattgtgtcgcgccaggagaaggggaagtccctcctgttcaaaactgaaaacggcgtgaacatgtgtaccctgatggccatggaccttggagaactgtgcgaggacaccatcacctacaattgtccgctcctgcgccaaaacgaaccagaagatatcgactgctggtgcaattccacttcaacctgggttacctacggaacttgcaccgccacgggagaacacagaagagaaaagcgctcggtggcgctggtgcctcatgtcggaatgggactggagactcggacggagacttggatgtcctcggagggagcatggaaacatgcccaacggatcgaaacttgggtgctgaggcaccctggattcaccatcatggcagcgatcctcgcctacactataggtactacctactttcaaagggtgctgatcttcattctcctcaccgcagtggccccttcaatgaccatgaggtgcattgggatctcgaaccgggacttcgtcgaaggagtgtccggaggtagctgggtcgacatcgtcctggaacacggaagctgcgtgactactatggcgaagaacaagccaaccttggacttcgagcttatcaagaccgaggcgaagcacccggccactctgagaaagtactgcatcgaggctaagctcaccaacacgaccactgcctcgcgatgcccaactcagggagaaccgtcactgaacgaagaacaggataaacgctttgtgtgcaagcatagcatggtggatagaggctggggaaacggctgtggactcttcggaaagggtggaattgtgacgtgcgcaatgttcacttgcaagaagaatatggaagggaagatcgtccagccggagaacctggaatacactatcgtgatcaccccgcactcaggcgaggagaacgcagtgggcaacgataccgggaagcacgggaaggaaatcaaggtgaccccgcagtcgtccattaccgaggccgaactcaccggatacggcactgtgactatggaatgctcgccacggaccgggctggatttcaatgagatggtgctcttgcaaatggagaacaaagcctggctggtccaccgccagtggttcctcgacctcccccttccgtggctgccgggagctgacacccaaggatccaactggatccaaaaagaaacccttgtcacgtttaagaatccacatgccaaaaagcaggacgtggtcgtgctcggaagccaggaaggagccatgcacactgcgctgactggagcaaccgaaattcaaatgtcgagcggcaacctcctcttcactggacatctgaagtgccggctgcgcatggacaaactgcaacttaagggcatgtcatactcgatgtgtaccggcaaattcaaggtggtgaaggagatcgcggagactcagcacgggaccatcgtcatccgggtccagtatgagggtgatggttccccctgcaagatccctttcgaaatcatggatctggagaaacgtcacgtgctgggccggctgatcactgtgaatccgatcgttacggagaaagacagcccggtgaacatcgaagctgaaccgccgtttggggatagctacattatcatcggcgtggaaccaggccagctcaagttgtcgtggttcaagaaaggaggaggtggaggatccggaggcggagggtcgggcggtggtggatcggaggtcaaactgcagcaatcagggaccgaagtcgtgaagccgggggcttcagtcaagctgtcctgcaaggccagcggctatatcttcactagctacgacatcgattgggtgcggcagactccggagcaaggactcgagtggattgggtggatctttccgggcgagggatcaaccgagtacaacgaaaaatttaagggacgggcaacgctgtccgtggacaagagctcatctacggcgtacatggagctgacgcggctcacgtcagaggattccgccgtctacttctgtgccaggggcgactactaccggcgctactttgatctgtggggacaaggaacgaccgtgactgtctcatcaggcggcggcggatcgggaggaggcggatcgggtggcggtggttcggacattcagatgactcaatcgcccagcttcctgtcgacctcactggggaattctattacgatcacttgtcacgcttcgcagaacatcaagggttggctggcttggtaccagcagaaaagcggtaacgccccgcaactgctcatctacaaggcatcgtccctgcaatcgggagtgccgtcacgcttttcaggatcgggctccggaaccgattacatctttaccatcagcaacctgcagccggaagacatcgccacttactactgtcaacactatcagagctttccgtggacctttggaggggggaccaaattggagatcaagcgcgactacaaggatgacgatgacaaa

SEQ ID NO: 230 - DNA, 916 bp, synthetic construct
  misc_feature 1..916: note = Synthetic Polynucleotide
  source 1..916: mol_type = other DNA
atggattggacctggatcttgtttctcgtcgccgcagccactcgcgttcatagcaaaggaatgtcatactccatgtgcacgggaaaattcaaggtggtcaaagagatcgcggagactcagcacggcaccatcgtcattcgcgtgcaaactgaaggagatggatctccctgcaagatcccgttcgagatcatggacctggaaaagagacacgtcctcggtagactgatcaccgtgaacccgatcgtgacggagaaggattccccggtgaatattgaagcagagcctccatttggggactcatacattatcattggggtcgagccgggccagctgaagctgaattggtttaagaagggctcgtcaatcggacagatgttcgaaactactatgaggggtgcaaagcggatggcgatcctctcgggcggagatatcatcaaactccttaacgaacaggtgaacaaggagatgcagtcctcaaacctttacatgagcatgtcgtcctggtgttacacccatagcctggacggcgctggattgttcctgtttgaccatgcagcggaggaatacgaacacgccaagaagctcatcatcttcctgaacgagaataacgtgccagtgcaactgacctccatctcggctcctgagcacaagttcgaaggactcacccagatcttccaaaaggcctacgaacacgaacagcacatcagcgaatccatcaacaatatcgtggaccatgctatcaaaagcaaagaccatgcgaccttcaacttcctgcaatggtatgtcgccgaacagcacgaagaggaggtgctgttcaaggacattctcgacaaaatcgaattgatagggaacgaaaatcacggtctgtacctggccgatcaatacgtgaagggaattgccaagtcgcggaagtcgt

SEQ ID NO: 231 - DNA, 2058 bp, unidentified
  source 1..2058: mol_type = genomic DNA; note = Dengue Virus
atgctgaatattctgaaccgccgccgccggactgccgggattataattatgatgattcccaccgtgatggccttccacctgaccacccggaacggggaaccacatatgatcgtgtccagacaggagaagggaaagtccctgctgttcaagaccgaggacggcgtgaacatgtgcaccctcatggctatggacctgggcgaactctgcgaggacaccatcacctacaagtgccccctgttgaggcagaacgagccggaggatattgactgctggtgcaattcgaccagcacctgggtcacctacgggacttgcaccacaaccggagaacatcggcgcgaaaagcgcagcgtggctttggtgcctcacgtcggaatggggctggagactagaaccgagacttggatgtcgtcggaaggggcctggaaacacgcacagcgcatcgaaacttggatactcaggcatcccggcttcaccattatggccgcgatcctggcatacaccatcggtactacccacttccaacgggccctgatctttatcctcctgaccgctgtcgcaccatccatgaccatgcggtgtatcggtatcagcaacagggacttcgtggagggagtgtcgggaggatcctgggtggatattgtgctggaacacggttcctgcgtcactaccatggcgaagaacaagcctaccctggactttgagctgatcaaaactgaggccaagcagccggccaccctgcgcaagtactgcatcgaagccaagctgaccaataccactaccgaatcccgctgtccgacccaaggggagccctccctgaatgaggagcaggacaagcgcttcgtctgcaagcattcaatggtcgaccgcggctggggaaacggctgcggactgttcggaaagggcggcattgtgacctgtgccatgttcacttgcaagaagaacatggaaggaaagatcgtgcagcccgaaaacctggagtataccatcgtcgtgaccccgcactccggggaagaacacgctgtgggaaacgacaccggaaagcacggaaaggagatcaaagtgaccccacagtcgagcattaccgaggccgaacttactggttacggcactgtgacgatggaatgttcaccgagaactggactggatttcaacgaaatggtgctgctccaaatggaaaacaaggcctggctggtgcaccgccagtggtttcttgacctccctctcccttggctgcctggagcagacactcagggttccaactggattcagaaggaaacactcgtgaccttcaagaaccctcacgcgaagaagcaggatgtggtcgtgctgggaagccaggagggagcgatgcataccgccctcaccggcgcgacggagattcagatgtccagcggaaaccttctgttcaccggacacctgaagtgcagactgaggatggacaagctgcagctcaagggaatgtcctactccatgtgcactggaaagttcaaggtcgtgaaggagattgccgaaactcagcatggtaccatcgtgatccgggtgcaatatgaaggggacggatccccgtgcaagatccctttcgaaatcatggacttggagaagcgacacgtgctgggcagactgatcacagtcaaccccatcgtgactgagaaggattcacccgtgaacattgaagccgagccgcctttcggcgatagctacatcatcattggcgtggaaccgggacagcttaagctcaactggttcaagaagggttcctcgatcggtcaaatgtttgaaaccacgatgcggggtgccaaacggatggccattctgggagacaccgcctgggatttcggctccttgggcggagtgttcacttctatcggaaaggcgctgcaccaagtgttcggagccatctacggcgccgcgttctcgggcgtcagctggaccatgaagattctgatcggggtcatcatcacttggattgggatgaactcacggtccacctccctgagcgtgtcccttgtcctggtcggcatcgtgaccctgtacctcggagtgatggtgcaggcttag

SEQ ID NO: 232 - DNA, 2058 bp, unidentified
  source 1..2058: mol_type = genomic DNA; note = Dengue Virus
atgcttaacattctcaaccgccgccggagaactgctggtattatcattatgatgattcccactgtgatggccttccacctgaccacgcggaacggcgaaccccatatgattgtcggtcggcaggaaaaggggaagtccctgctgttcaaaactgaggacggagtgaacatgtgcaccctcatggctattgacctgggagagctgtgcgaagatactatcacgtacaagtgccccctgctgcgccagaacgagcctgaggacattgactgctggtgcaactccacgtcaacctgggtcacctacggaacttgcgcgactaccggcgaacatcgcagagaaaagagaagcgtggccctcgtgccgcacgtcgggatggggctggaaacccggaccgaaacctggatgtcctcggaaggcgcctggaagcacgtgcagaggatcgaaacttggatcctccggcacccgggattcaccatcatggccgccatcctcgcttacacaatcggaaccactcactttcaacgcgccctgatcttcatcctgcttaccgccgtggccccgtccatgaccatgcgctgcattggaatgtcaaaccgggacttcgtcgagggagtctccggaggaagctgggtggacatcgtgctggagcacggcagctgtgtgaccaccatggccaagaacaagccaactcttgatttcgaactgatcaagaccgaggccaagcagcctgccactctgaggaagtactgtatcgaagcgaagctgaccaacaccactaccgaatcccgctgcccgacccagggcgaaccttccttgaacgaagaacaggacaagagattcgtgtgcaagcatagcatggtcgacaggggatgggggaacggatgtggactctttgggaagggcggaatcgtcacctgtgcgatgttccggtgcaagaagaacatggaggggaaggtcgtgcagcccgaaaatctcgagtacactatcgtgatcaccccgcattccggagaggagcacgccgtgggcaacgacaccgggaagcacggaaaggagatcaaaattacccctcaatcctccaccaccgaagccgaattgactggttacggtaccgtgactatggagtgctcgccgcggactggcttggacttcaacgagatggtgctgctgcaaatggagaacaaggcctggctggtgcaccggcagtggtttcttgatctgcctctgccttggctgcccggagccgacacccagggtagcaattggatccagaaagagacactcgtgacctttaagaacccgcacgcaaagaagcaggatgtcgtggtcctgggaagccaagaaggggcaatgcataccgcactcactggagccactgaaatccagatgtcctccggcaatctgctgttcaccggccatctgaagtgccgactgcgcatggacaagctccagcttaagggaatgtcctactccatgtgtactggaaagttcaaagtcgtgaaggaaattgccgaaacccagcacggcaccatagtgatccgggtgcagtacgagggcgacggctcaccctgcaaaatcccgttcgagattatggatctcgaaaagcgccacgtgctgggcagactgattaccgtgaaccctatcgtgaccgagaaggattccccagtgaacatcgaggccgaaccgcccttcggagactcgtatatcatcatcggcgtggagcccggccagctgaagctgaactggttcaagaaggggtcgagcatcggccagatgttcgagactaccatgcgcggcgcgaagaggatggcgatcctgggggataccgcttgggacttcggttccctcggcggggtgttcacctcgattgggaaggccctccaccaagtgttcggtgcaatctacggagcggcgttcagcggagtgtcgtggaccatgaagattctgatcggcgtgatcatcacctggattggcatgaactcccggtctactagcctgtcggtgaccctggtgctggtcggaatcgtgaccttgtacctgggagtgatggtgcaagcttag

SEQ ID NO: 233 - DNA, 2058 bp, unidentified
  source 1..2058: mol_type = genomic DNA; note = Dengue Virus
atgctgaacatcctgaaccgcagaaggagaaccgccggtattattattatgatgatccccaccgtgatggcattccacctgactacccgcaacggagagccgcatatgatcgtgggccgccaggaaaagggaaagtccctgctgttcaagactgaggacggcgtgaacatgtgcactctcatggccatcgacctcggcgaactgtgcgaggacaccattacttacaagtgcccgctgctgagacagaacgagcctgaggacatcgactgttggtgtaactcgacctccacctgggtcacctacggaacgtgcgccacaaccggagaacaccgccgggaaaagcggagcgtggctctggtgccgcacgtcggaatgggtctggagactagaaccgaaacctggatgtcatccgagggggcatggaaacatgtgcagcgaatcgagacttggatcctgagacacccgggcttcactatcatggcggccatccttgcctacaccattggcactactcacttccaacgggcgctgatcttcatactgctcaccgcggtggccccctccatgacgatgcgctgcatcggaatctccaaccgggacttcgtggagggcgtcagcggaggcagctgggtggacatcgtgttggagcacggaagctgcgtgaccaccatggccaagaacaagcccactcttgattttgagctgatcaagacggaagcaaagcagccggccactctgaggaagtactgcatcgaggccaagctcaccaacacaaccaccgaatctcggtgcccgacccaaggagagccatcactgaacgaggaacaggacaagagattcctgtgcaaacattcgatggtggacaggggatggggaaatggttgcggcctgttcggcaaaggaggcattgtgacctgtgcgatgttcacttgcaagaaaaacatggaggggaaggtcgtgttgccggagaacctggagtacactatcgtgattaccccgcactccggggaggaacatgccgtgggaaatgacaccggaaagcacgggaaggaaatcaaaatcacgcctcagtcctcaatcaccgaagccgagcttaccggctacggtaccgtgaccatggagtgcagccctcggactggactggacttcaacgagatggtgctgctgcaaatggaagataaggcctggctggtgcaccggcagtggttcttggatttgccactgccttggctgcccggcgcggatacccagggttccaactggattcagaaggaaaccctcgtgaccttcaagaatcctcacgccaagaagcaggacgtggtggtgctgggttcccaagaaggggccatgcatactgccctcactggagcgaccgaaatccagatgtcgtccggcaacctcctgttcaccggccacctgaagtgccgcctgcggatggacaagttgcagctgaagggaatgagctactcgatgtgtaccggaaagttcaagatcgtgaaggaaatcgccgaaacccagcacggaaccatcgtcattagagtgcagtacgaaggggacggcagcccgtgcaagatccccttcgaaattatggacctggagaagcgccacgtgctcggaaggctcatcactgtcaacccaatcgtcaccgaaaaggactcccctgtgaacatcgaagcagagccccctttcggggactcctacattattatcggcgtggagcccggccagctgaagctgaactggttcaagaagggatcctcgatcggacagatgttcgaaaccaccatgcggggagccaagcggatggctattctgggagataccgcttgggatttcggctccctcggcggcgtctttacttccatcgggaaagcgctccaccaagtgtttggagccatctacggtgccgctttttccggggtgtcatggaccatgaagattcttatcggggtcattattacttggatcggcatgaactcccggagcacctcgctgtccgtgagcctcgtgctcgtgggggtggtcactctgtatcttggtgccatggtgcaggcctag

SEQ ID NO: 234 - DNA, 2058 bp, unidentified
  source 1..2058: mol_type = genomic DNA; note = Dengue Virus
atgcttaacatcctgaatagaagaagaagaaccgccggcattatcattatgatgatacccaccgtgatggccttccacctgactactcgcaacggagagcctcatatgatcgtgtcgcggcaggagaagggaaagtccctgctgtttaagacggaggacggcgtgaacatgtgcactcttatggcaatggaccttggagagctgtgcgaggataccatcacctacaagtgtccgttcctgaagcaaaacgagcctgaggatattgactgctggtgcaactccacctcaacctgggtcacatatgggacctgtaccactactggcgaacaccgccgcgagaaaagaagcgtggcgttggtgcctcacgtcggcatgggtctggaaactcggaccgaaacttggatgagctcagagggggcatggaagcacgcccagaggattgaaacctggattctgcgccaccctggattcaccatcatggcggctattctggcgtacactattggaaccacccactttcagcgggcccttatcttcatcctcctcactgccgtggcgccctccatgactatgcggtgtatcggaatttccaaccgcgacttcgtggaaggagtgtccggaggctcctgggtcgacattgtgctggaacatggttcatgcgtgaccacgatggccaagaacaagcccaccctcgacttcgagctgatcgagactgaagccaagcagccggccactctgcggaagtactgtatcgaggccaagctcaccaacaccaccaccgattcccgctgcccgacccaaggagaaccttcgctcaacgaggagcaggacaagcggttcgtgtgcaagcacagcatggtcgacaggggatgggggaatggatgcggtctgttcggaaagggaggcattgtgacttgtgcaatgttcacttgcaagaagaacatgaaggggaaggtcgtgcagccggaaaacctggagtacaccatcgtgatcacccctcattcgggcgaagaacacgctgtggggaatgataccggaaagcacggaaaggaaattaagatcacaccccaatccagcatcactgaggcagaactgaccggctacggcactgtgaccatggagtgctcgcctcggactggcctggacttcaacgagatggtgctgctccaaatggaaaacaaggcctggctggtgcacagacagtggttcctcgatttgcccttgccgtggctccctggcgccgacacccagggatctaactggatccagaaggaaacccttgtgaccttcaagaacccgcacgctaagaaacaggatgtggtggtgctgggaagccaggaaggagcaatgcataccgcgctcacgggtgccaccgagatccagatgagctccgggaacctcctgttcaccggtcacctgaagtgccgactccgcatggacaaactgcagctcaaggggatgtcctactccatgtgcaccgggaaattcaaggtcgtgaaggagatcgctgagactcagcacggtactatcgtgatccgggtgcagtatgagggagatgggagcccgtgcaaaatcccatttgagatcatggacttggaaaagcgccatgtgctgggtcggctgattaccgtgaacccaatcgtcaccgaaaaggacagccccgtcaacattgaagccgaaccacccttcggagactcgtacatcatcattggcgtggaaccgggccagctgaagctgaactggttcaaaaaggggtcctctatcggccaaatgatcgaaaccaccatgcggggagctaagcggatggcgattttgggagacactgcgtgggactttggctcactggggggagtgttcaccagcatcggcaaagccctgcaccaagtgttcggtgccatctacggagccgccttcagcggagtgtcctggatcatgaagatcctgatcggcgtgatcattacctggatcggcatgaactccaggtccacctcgctctccgtgtcgctggtgctggtcggggtcgtgaccctgtacctgggagtgatggtccaggcctga

SEQ ID NO: 235 - DNA, 2058 bp, unidentified
  source 1..2058: mol_type = genomic DNA; note = Dengue Virus
atgttgaatatcctgaaccgccgccggagaactgccggaattatcattatgatgatccctaccgtgatggcgttccaccttactacccggaacggggagcctcacatgatcgtgtcacgccaggagaaggggaaatccctgctgttcaagaccaaggacggtaccaacatgtgtaccctgatggcgatggacctcggagagctgtgcgaggacaccatcacctacaaatgcccgttcctgaagcagaacgagccggaagatattgactgttggtgcaactccacctccacttgggtcacctacggaacttgcaccactactggggagcatagacgggagaagcgctccgtggccctggtgccgcacgtcggcatgggactggaaaccagaaccgagacttggatgtccagcgaaggcgcctggaagcacgcccagcggattgaaacttggatcctgaggcacccgggttttaccattatggccgctatcttggcatacaccatcggcaccacccacttccaacgcgtcctgatcttcatcctgctgaccgccattgcgccctccatgaccatgcggtgcatcggaatcagcaaccgcgacttcgtggaaggcgtcagcggcggttcttgggtggacatcgtgttggagcacggatcgtgcgtgaccaccatggccaagaacaagccgaccctcgatttcgagctgatcaagactgaagccaagcagccagctaccctgcggaagtattgcatcgaagccaagctcactaatactacgaccgacagccggtgtccgacccaaggagagcccaccctgaatgaggaacaagacaagcgcttcgtgtgcaagcattccatggtggaccggggctggggaaacggctgcggactgttcgggaaaggaggaattgtgacttgcgccatgttcacttgcaagaagaacatggaggggaagatcgtccagcctgagaacctcgagtacacggtcgtgattactccgcactcgggagaagaacacgccgtgggcaacgacaccggaaagcatgggaaggaagtgaaaatcacgccccaatcgtcgattaccgaggctgagctgaccggctacggcaccgtgaccatggagtgctccccgaggaccggactggacttcaacgaaatggtgctgctgcagatgaaggacaaggcctggctggtgcaccgccagtggttcctcgacctcccactcccctggctgcccggagcggatacgcagggatccaactggatccagaaggaaactcttgtgaccttcaagaaccctcatgccaagaagcaggacgtggtggtcctgggatcccaagagggcgcgatgcacaccgcactgaccggcgccaccgaaattcagatgtcctccggaaacctcctgttcactggccacctgaagtgcagactccgcatggacaagctgcagctcaaggggatgagctactccatgtgtaccggaaaattcaaggtcgtgaaggaaattgcagaaacacagcatgggacaattgtcattcgggtccagtacgagggcgatggttcaccgtgcaagactccattcgagatcatggatctggagaaaagacacgtgctgggtcggctgactaccgtgaacccaatcgtgactgagaaggactcccccgtgaacatcgaagccgagcctccttttggcgattcctacatcatcattggagtggaacccggacagcttaagttggattggttcaagaagggctcctcgatcggacagatgttcgaaaccaccatgcgcggtgccaagcgaatggccatcctgggggacaccgcctgggacttcggtagcctgggcggagtgtttacctcaattggaaaggctctgcaccaagtgtttggggcgatctacggagcggccttcagcggtgtctcctggactatgaagattctcatcggagtgataatcacctggatcggcatgaacagccggtcaaccagcctgtccgtgtccctggtgctggtcggcatcgtgactctctacctcggagtgatggtgcaggcctag

SEQ ID NO: 236 - DNA, 2058 bp, unidentified
  source 1..2058: mol_type = genomic DNA; note = Dengue Virus
atgctcaacatactgaacagacggagaaggaccgccggtattattatcatgatgatccctactgtgatggcattccacctgacaacccgcaacggagagccccacatgatcgtgtcacgccaggagaaagggaagtcactgctgttcaagaccgaagtcggcgtgaacatgtgtaccctgatggcgatggatcttggcgaactgtgcgaggacaccatcacgtacaagtgccccctgttgcggcaaaacgaaccagaggacatcgactgctggtgtaactccacctcgacctgggtcacctacggaacctgtaccactatgggggaacaccggcgggagaagcgctccgtggcgctcgtgcctcatgtcggcatgggactggagactcggactgaaacctggatgtcgtcggagggggcctggaagcacgtccagcggatcgagacttggatccttcgccatccgggcttcaccatgatggccgccatcctggcctacaccatcggaaccacccatttccaacgggccctgatcctgatcctgttgactgccgtgaccccctccatgactatgcggtgcattgggatgtcgaacagggatttcgtggagggagtcagcggtggcagctgggtggacatcgtgctggaacatggatcctgcgtgactaccatggcaaagaacaagccaaccctcgatttcgaactgatcaagaccgaggcgaaacagccggcgaccctgaggaagtactgcatcgaggccaagctcaccaacaccactaccgagagcagatgccctacccaaggggaaccttccctgaacgaggagcaggacaagagattcgtctgcaagcactccatggtggaccgcggctggggaaacggatgcggactcttcggaaagggcggtattgtgacctgtgccatgttccgctgcaagaaaaacatggaagggaaagtggtgcagcccgagaacctcgagtacactatcgtgatcacaccgcacagcggagaagaacacgccgtgggcaacgacactggaaagcacgggaaggaaatcaagatcaccccgcaatcctcaatcactgaggctgagttgaccggctacgggactattaccatggaatgctccccacgaacgggactggacttcaacgaaattgtgttgctccaaatggaaaacaaggcctggctcgtgcaccggcagtggttcctggatctgcccctgccgtggctgccgggtgccgacactcaggggagcaactggattcagaaggaaacccttgtgaccttcaagaacccccacgcaaagaagcaggacgtggtggtgctgggtagccaagaaggcgccatgcacacggccctgaccggagcgaccgagatccagatgtccagcggaaatctgctctttactggtcatctgaagtgcagacttcggatggacaagctgcaactgaagggaatgtcctactcaatgtgcactggaaagttcaaggtcgtgaaggagatcgccgaaacccagcacgggactatcgtcatccgcgtgcagtacgaaggagatggctccccgtgcaagatccctttcgaaatcatggacctggagaagcgccacgtgttggggcgccttattactgtgaaccccatcgtgaccgagaaggactcccctgtcaacatcgaggctgaaccgccattcggagattcctatatcattatcggagtggaaccgggccagctcaagctgaattggttcaagaagggatcctcgattggccagatgttcgaaacgactatgcggggcgctaagcgcatggccatcctgggcgatactgcctgggattttggttctctgggcggagtgttcacctccattggaaaggccctgcaccaagtgttcggcgccatctacggtgccgcgtttagcggtgtctcatggaccatgaaaatcctcattggcgtgatcattacctggattggcatgaactccagaagcacttccctgtccgtgaccctggtgctcgtcggaattgtgacactctacctcggagtgatggtgcaggcttga

SEQ ID NO: 237 - DNA, 2058 bp, unidentified
  source 1..2058: mol_type = genomic DNA; note = Dengue Virus
atgctgaacattttgaacagacgccgaaggaccgcaggcattatcattatgatgatccctaccgtgatggccttccatctgactactaggaacggagagccacatatgatcgtgtcgcgccaggaaaagggaaagagcctgctttttaaaaccaaggacggcacgaacatgtgcacccttatggccatggacctgggggagttgtgcgaggacaccatcacctacaagtgcccgttcctgaagcaaaacgagcccgaagatattgactgctggtgcaactccacctccacctgggtcacttatgggacttgcaccaccaccggcgaacatcgcagagaaaagagaagcgtggccctggtcccccacgtcgggatgggcctcgagactcggaccgaaacttggatgtcatcagagggcgcatggaagcatgctcagcggatcgaaacctggatcctgagacaccctggtttcacaattatggccgccattcttgcgtacacgatcggaacgactcatttccaacgcgtgctgatcttcattctcctgaccgctattgcgccgtccatgactatgcggtgcatcggaatctcaaaccgggacttcgtggaaggagtgtcgggaggatcctgggtggacattgtgctggagcacggttcctgcgtcaccaccatggccaaaaacaagcctaccctggacttcgagctgatcaagactgaggccaagcagcccgcgaccctccggaagtactgcatcgaggccaagttgaccaacactactaccgattcccggtgcccgacccaaggagaaccaactctgaacgaagaacaggataagcggtttgtgtgcaagcactcaatggtggacaggggatggggcaacggctgtggactgttcggaaagggtggtattgtgacctgtgcaatgtttacctgtaaaaagaatatggaggggaagatcgtgcagcctgaaaatctcgagtacactgtcgtcatcaccccgcactcgggagaggagcacgctgtgggcaacgacaccggaaagcacggaaaggaggtcaagataaccccgcaatcctccattacggaagccgaactgactggttacggcaccgtgactatggagtgctcccctcggaccggcctggacttcaacgaaatggtgctgctccaaatggaagataaggcctggctggtgcacaggcagtggttcctggatctcccgctgccgtggctgcctggcgctgacactcagggaagcaactggatccagaaggaaaccctcgtgacctttaagaacccccacgccaagaagcaggatgtggtggtgttgggaagccaggagggggccatgcatactgccctcaccggcgcgaccgaaatccagatgtcgtccggcaatctgctgttcaccggacacctcaagtgtcgccttcggatggacaagctgcagctgaagggaatgagctacagcatgtgcaccgggaagttcaagatcgtgaaggaaatcgccgaaacccagcacggaaccatcgtgatccgggtgcagtacgagggcgacggttctccctgcaaaatccccttcgaaatcatggatctggagaagagacacgtcctgggtcgcctgatcaccgtgaaccccattgtgactgagaaggactccccagtgaacatcgaagcggagcccccattcggagacagctacattatcattggtgccgaaccggggcagctgaaactggactggttcaagaagggcagctcgattggccaaatgttcgaaacgacaatgcggggcgcaaagcgcatggccatcctgggagacactgcctgggacttcgggtcccttgggggggtgttcacctcgatcggaaaagccttgcaccaagtgttcggcgcaatctacggcgccgcgttctcgggagtctcctggactatgaagatcctgatcggtgtcatcatcacctggatcgggatgaactcccggtccacttccctctcggtgtcactcgtgcttgtgggaattgtcaccctgtacctcggagtgatggtgcaggcctga

SEQ ID NO: 238 - DNA, 2058 bp, unidentified
  source 1..2058: mol_type = genomic DNA; note = Dengue Virus
atgctgaatattctgaaccgacgccgccgcactgccggaatcattatcatgatgatccctaccgtgatggcgttccatctcaccactcggaatggcgaaccccatatgatcgtgtcgagacaggaaaagggaaagagccttttgttcaaaactgaagatggagtgaacatgtgcactctcatggcaatggatctgggcgaactgtgcgaagataccatcacttacaagtgtccgctgttgagacagaacgagcctgaggacatcgactgctggtgtaacagcacttccacctgggtcacctacggcacttgcactaccaccggagaacaccggcgcgagaagaggagcgtggctcttgtgccgcacgtcggcatgggactcgagactcggaccgaaacctggatgtcatccgaaggagcctggaaacacgcccaacggatcgaaatttggatcctgagacaccccggtttcactatcatggccgcaatcctggcgtacactattggcaccacgcacttccagagggccctcattttcatcctcctgactgccgtggcgccatccatgaccatgagatgtattggcatttccaaccgcgatttcgtggagggagtgtccggaggatcctgggtcgacatcgtgctggaacacggatcttgcgtcaccaccatggctaagaacaagcccaccctcgacttcgagctgatcaagacagaagccaagcagccggccaccctccgcaagtattgcattgaagccaagcttaccaacaccaccaccgagtcgcggtgcccaacccaaggagagccgagcctcaatgaggaacaggacaagcgcttcgtgtgcaaacacagcatggtcgaccggggttggggcaacggatgtggcctgttcgggaagggtggcattgtgacttgcgcaatgttcacttgcaagaagaacatggaggggaaagtggtgcaacccgagaacctggagtacaccatcgtcgtgaccccacactccggagaggagcacgccgtgggaaacgacacggggaagcatggaaaggagatcaaggtcacaccccaatcatctattaccgaggccgaactgaccggatacggtactgtgacgatggagtgcagcccgaggactggactggacttcaacgaaatggtgctgctgcaaatggagaacaaggcctggctcgtgcaccggcagtggtttctggatctcccactgccgtggttgccgggagccgacacccaggggtcgaactggatccagaaggaaactcttgtgacgtttaagaatcctcacgcgaagaagcaggacgtggtggtcctgggatcgcaggaaggagctatgcacaccgctctgaccggcgccactgagatccagatgtcctcgggcaacctcctgttcaccggtcatctgaagtgccggctgcggatggacaaattgcagctgaaggggatgtcctactccatgtgcaccgggaagttcaaggtcgtgaaggagatcgcggaaactcagcacggcaccattgtcattagagtgcagtacgagggagatggttcaccgtgcaagataccgttcgaaatcatggacctggaaaagagacatgtcttgggacgcctgatcactgtgaaccctatcgtgaccgaaaaggactcccctgtgaacatcgaggcggagccgcctttcggcgactcctacatcattatcggagtggagcccgggcagctgaagctcaactggtttaagaaggggtccagcatcggccagatgttcgaaaccaccatgcggggggcgaagaggatggcgatcctgggagacaccgcctgggatttcggttcactgggcggagtgttcacctccatcggaaaggccctgcaccaagtgttcggcgcaatctacggtgctgccttctcgggagtctcctggaccatgaagatcctgatcggcgtgattatcacatggatcggcatgaacagccggtcaacctccctttccgtgtccctggtgctggtcggcatcgtgactctgtacctgggcgtgatggtgcaggcctga

SEQ ID NO: 239 - DNA, 2058 bp, unidentified
  source 1..2058: mol_type = genomic DNA; note = Dengue Virus
atgctgaacattctgaaccggagaagaagaaccgccggcattattatcatgatgattcccactgtgatggcatttcacctgaccacccggaacggagaacctcatatgatcgtgtcgagacaggagaagggaaagtccctgctgttcaagacagaaaacggagtgaacatgtgcaccctgatggccatggatctcggcgaactgtgcgaggatactatcacctacaactgtccgttgctgcgccaaaacgagccggaggacatcgactgctggtgtaactccacgtcgacctgggtcacctacggcacttgcaccgcgaccggcgaacacagaagagagaaacgctccgtcgctctggtgccgcacgtcgggatggggcttgaaacccggactgaaacctggatgagctcggagggcgcttggaagcatgcccagcgcatcgaaacttgggtgctgaggcatccaggcttcacaatcatggccgccatcctcgcgtacaccatcggtactacgtacttccagcgggtgttgatcttcattctgctgaccgccgtggcccctagcatgaccatgcggtgcatcgggatctccaaccgcgatttcgtggagggggtgtccggtggaagctgggtggacattgtgctggagcacggctcgtgcgtgaccaccatggccaagaacaagcccacccttgattttgagctgatcaagaccgaagcgaaacaccccgcgaccctccggaagtactgcattgaagccaagctcaccaacactaccacggcctcccggtgccctacccaaggagaaccttccttgaacgaagaacaggacaagcgcttcgtgtgcaagcattcaatggtggaccggggctggggaaatggctgtggcctcttcggaaaaggcggaattgtgacttgcgcaatgttcacttgcaagaagaacatggagggaaagattgtgcagcccgagaacctcgagtacactattgtcatcactccccactccggcgaagaaaacgctgtcggcaacgacaccggaaagcatggaaaggagatcaaggtcaccccgcaatcctcaattactgaggcagaactgaccggttacggaactgtgactatggagtgttcccctcgcaccggcctcgatttcaacgagatggtgctgctgcaaatggagaacaaggcctggctggtgcaccggcagtggttcctcgatttgcccctgccgtggctgccgggagccgacactcagggatccaactggatccagaaagaaaccctcgtgaccttcaaaaacccccacgcgaagaagcaggacgtggtggtgctgggttcccaagaaggggcgatgcataccgccctgactggtgctaccgaaatccagatgtcaagcggaaatctcctgtttaccggtcacctgaagtgcaggctccggatggacaagttgcagctgaaggggatgtcgtacagcatgtgtactgggaagttcaaggtcgtgaaggagattgccgaaacccagcacggaaccatagtcatcagggtccagtacgagggcgacggcagcccttgcaagatcccgttcgagatcatggatctggagaagcgacacgtgctgggccggcttatcactgtgaatccaatcgtgaccgagaaagactcgcccgtgaacatcgaagccgagccgccgttcggcgactcatacatcatcatcggcgtggaaccaggacagctgaagctgtcatggttcaagaagggttccagcattggtcagatgttcgaaacaacgatgcgcggagccaagcgcatggctatccttggggacaccgcctgggacttcgggtcgctgggaggagtgtttaccagcatcggaaaggccctgcaccaagtgttcggtgccatctacggagccgcattttccggagtgtcgtggactatgaagattctgatcggcgtcgtgattacctggatcgggatgaactccaggtctacttccctctccgtgagcctggtgctggtcggcgtggtcaccctgtatctgggcgtgatggtccaggcttag

SEQ ID NO: 240 - RNA, 10735 nt, unidentified
  source 1..10735: mol_type = genomic RNA; note = Dengue Virus
agttgttagtctacgtggaccgacaagaacagtttcgaatcggaagcttgcttaacgtagttctaacagttttttattagagagcagatctctgatgaacaaccaacggaaaaagacgggtcgaccgtctttcaatatgctgaaacgcgcgagaaaccgcgtgtcaactgtttcacagttggcgaagagattctcaaaaggattgctttcaggccaaggacccatgaaattggtgatggcttttatagcattcctaagatttctagccatacctccaacagcaggaattttggctagatggggctcattcaagaagaatggagcgatcaaagtgttacggggtttcaagaaagaaatctcaaacatgttgaacataatgaacaggaggaaaagatctgtgaccatgctcctcatgctgctgcccacagccctggcgttccatctgaccacccgagggggagagccgcacatgatagttagcaagcaggaaagaggaaaatcacttttgtttaagacctctgcaggtgtcaacatgtgcacccttattgcaatggatttgggagagttatgtgaggacacaatgacctacaaatgcccccggatcactgagacggaaccagatgacgttgactgttggtgcaatgccacggagacatgggtgacctatggaacatgttctcaaactggtgaacaccgacgagacaaacgttccgtcgcactggcaccacacgtagggcttggtctagaaacaagaaccgaaacgtggatgtcctctgaaggcgcttggaaacaaatacaaaaagtggagacctgggctctgagacacccaggattcacggtgatagccctttttctagcacatgccataggaacatccatcacccagaaagggatcatttttattttgctgatgctggtaactccatccatggccatgcggtgcgtgggaataggcaacagagacttcgtggaaggactgtcaggagctacgtgggtggatgtggtactggagcatggaagttgcgtcactaccatggcaaaagacaaaccaacactggacattgaactcttgaagacggaggtcacaaaccctgccgtcctgcgcaaactgtgcattgaagctaaaatatcaaacaccaccaccgattcgagatgtccaacacaaggagaagccacgctggtggaagaacaggacacgaactttgtgtgtcgacgaacgttcgtggacagaggctggggcaatggttgtgggctattcggaaaaggtagcttaataacgtgtgctaagtttaagtgtgtgacaaaactggaaggaaagatagtccaatatgaaaacttaaaatattcagtgatagtcaccgtacacactggagaccagcaccaagttggaaatgagaccacagaacatggaacaactgcaaccataacacctcaagctcccacgtcggaaatacagctgacagactacggagctctaacattggattgttcacctagaacagggctagactttaatgagatggtgttgttgacaatgaaaaaaaaatcatggctcgtccacaaacaatggtttctagacttaccactgccttggacctcgggggcttcaacatcccaagagacttggaatagacaagacttgctggtcacatttaagacagctcatgcaaaaaagcaggaagtagtcgtactaggatcacaagaaggagcaatgcacactgcgttgactggagcgacagaaatccaaacgtctggaacgacaacaatttttgcaggacacctgaaatgcagattaaaaatggataaactgattttaaaagggatgtcatatgtaatgtgcacagggtcattcaagttagagaaggaagtggctgagacccagcatggaactgttctagtgcaggttaaatacgaaggaacagatgcaccatgcaagatccccttctcgtcccaagatgagaagggagtaacccagaatgggagattgataacagccaaccccatagtcactgacaaagaaaaaccagtcaacattgaagcggagccaccttttggtgagagctacattgtggtaggagcaggtgaaaaagctttgaaactaagctggttcaagaagggaagcagtatagggaaaatgtttgaagcaactgcccgtggagcacgaaggatggccatcctgggagacactgcatgggacttcggttctataggaggggtgttcacgtctgtgggaaaactgatacaccagatttttgggactgcgtatggagttttgttcagcggtgtttcttggaccatgaagataggaatagggattctgctgacatggctaggattaaactcaaggagcacgtccctttcaatgacgtgtatcgcagttggcatggtcacactgtacctaggagtcatggttcaggcggactcgggatgtgtaatcaactggaaaggcagagaactcaaatgtggaagcggcatttttgtcaccaatgaagtccacacctggacagagcaatataaattccaggccgactcccctaagagactatcagcggccattgggaaggcatgggaggagggtgtgtgtggaattcgatcagccactcgtctcgagaacatcatgtggaagcaaatatcaaatgaattaaaccacatcttacttgaaaatgacatgaaatttacagtggtcgtaggagacgttagtggaatcttggcccaaggaaagaaaatgattaggccacaacccatggaacacaaatactcgtggaaaagctggggaaaagccaaaatcataggagcagatgtacagaataccaccttcatcatcgacggcccaaacaccccagaatgccctgataaccaaagagcatggaacatttgggaagttgaagactatggatttggaattttcacgacaaacatatggttgaaattgcgtgactcctacactcaagtgtgtgaccaccggctaatgtcagctgccatcaaggatagcaaagcagtccatgctgacatggggtactggatagaaagtgaaaagaacgagacttggaagttggcaagagcctccttcatagaagttaagacatgcatctggccaaaatcccacactctatggagcaatggagtcctggaaagtgagatgataatcccaaagatatatggaggaccaatatctcagcacaactacagaccaggatatttcacacaaacagcagggccgtggcacttgggcaagttagaactagattttgatttatgtgaaggtaccactgttgttgtggatgaacattgtggaaatcgaggaccatctcttagaaccacaacagtcacaggaaagacaatccatgaatggtgctgtagatcttgcacgttaccccccctacgtttcaaaggagaagacgggtgctggtacggcatggaaatcagaccagtcaaggagaaggaagagaacctagttaagtcaatggtctctgcagggtcaggagaagtggacagtttttcactaggactgctatgcatatcaataatgatcgaagaggtaatgagatccagatggagcagaaaaatgctgatgactggaacattggctgtgttcctccttctcacaatgggacaattgacatggaatgatctgatcaggctatgtatcatggttggagccaacgcttcagacaagatggggatgggaacaacgtacctagctttgatggccactttcagaatgagaccaatgttcgcagtcgggctactgtttcgcagattaacatctagagaagttcttcttcttacagttggattgagtctggtggcatctgtagaactaccaaattccttagaggagctaggggatggacttgcaatgggcatcatgatgttgaaattactgactgattttcagtcacatcagctatgggctaccttgctgtctttaacatttgtcaaaacaactttttcattgcactatgcatggaagacaatggctatgatactgtcaattgtatctctcttccctttatgcctgtccacgacttctcaaaaaacaacatggcttccggtgttgctgggatctcttggatgcaaaccactaaccatgtttcttataacagaaaacaaaatctggggaaggaaaagctggcctctcaatgaaggaattatggctgttggaatagttagcattcttctaagttcacttctcaagaatgatgtgccactagctggcccactaatagctggaggcatgctaatagcatgttatgtcatatctggaagctcggccgatttatcactggagaaagcggctgaggtctcctgggaagaagaagcagaacactctggtgcctcacacaacatactagtggaggtccaagatgatggaaccatgaagataaaggatgaagagagagatgacacactcaccattctcctcaaagcaactctgctagcaatctcaggggtatacccaatgtcaataccggcgaccctctttgtgtggtatttttggcagaaaaagaaacagagatcaggagtgctatgggacacacccagccctccagaagtggaaagagcagtccttgatgatggcatttatagaattctccaaagaggattgttgggcaggtctcaagtaggagtaggagtttttcaagaaggcgtgttccacacaatgtggcacgtcaccaggggagctgtcctcatgtaccaagggaagagactggaaccaagttgggccagtgtcaaaaaagacttgatctcatatggaggaggttggaggtttcaaggatcctggaacgcgggagaagaagtgcaggtgattgctgttgaaccggggaagaaccccaaaaatgtacagacagcgccgggtaccttcaagacccctgaaggcgaagttggagccatagctctagactttaaacccggcacatctggatctcctatcgtgaacagagagggaaaaatagtaggtctttatggaaatggagtggtgacaacaagtggtacctacgtcagtgccatagctcaagctaaagcatcacaagaagggcctctaccagagattgaggacgaggtgtttaggaaaagaaacttaacaataatggacctacatccaggatcgggaaaaacaagaagataccttccagccatagtccgtgaggccataaaaagaaagctgcgcacgctagtcttagctcccacaagagttgtcgcttctgaaatggcagaggcgctcaagggaatgccaataaggtatcagacaacagcagtgaagagtgaacacacgggaaaggagatagttgaccttatgtgtcacgccactttcactatgcgtctcctgtctcctgtgagagttcccaattataatatgattatcatggatgaagcacattttaccgatccagccagcatagcagccagagggtatatctcaacccgagtgggtatgggtgaagcagctgcgattttcatgacagccactccccccggatcggtggaggcctttccacagagcaatgcagttatccaagatgaggaaagagacattcctgaaagatcatggaactcaggctatgactggatcactgatttcccaggtaaaacagtctggtttgttccaagcatcaaatcaggaaatgacattgccaactgtttaagaaagaatgggaaacgggtggtccaattgagcagaaaaacttttgacactgagtaccagaaaacaaaaaataacgactgggactatgttgtcacaacagacatatccgaaatgggagcaaacttccgagccgacagggtaatagacccgaggcggtgcctgaaaccggtaatactaaaagatggcccagagcgtgtcattctagccggaccgatgccagtgactgtggctagcgccgcccagaggagaggaagaattggaaggaaccaaaataaggaaggcgatcagtatatttacatgggacagcctctaaacaatgatgaggaccacgcccattggacagaagcaaaaatgctccttgacaacataaacacaccagaagggattatcccagccctctttgagccggagagagaaaagagtgcagcaatagacggggaatacagactacggggtgaagcgaggaaaacgttcgtggagctcatgagaagaggagatctacctgtctggctatcctacaaagttgcctcagaaggcttccagtactccgacagaaggtggtgctttgatggggaaaggaacaaccaggtgttggaggagaacatggacgtggagatctggacaaaagaaggagaaagaaagaaactacgaccccgctggctggatgccagaacatactctgacccactggctctgcgcgaattcaaagagttcgcagcaggaagaagaagcgtctcaggtgacctaatattagaaatagggaaacttccacaacatttaacgcaaagggcccagaacgccttggacaatctggttatgttgcacaactctgaacaaggaggaaaagcctatagacacgccatggaagaactaccagacaccatagaaacgttaatgctcctagctttgatagctgtgctgactggtggagtgacgttgttcttcctatcaggaaggggtctaggaaaaacatccattggcctactctgcgtgattgcctcaagtgcactgttatggatggccagtgtggaaccccattggatagcggcctctatcatactggagttctttctgatggtgttgcttattccagagccggacagacagcgcactccacaagacaaccagctagcatacgtggtgataggtctgttattcatgatattgacagtggcagccaatgagatgggattactggaaaccacaaagaaggacctggggattggtcatgcagctgctgaaaaccaccatcatgctgcaatgctggacgtagacctacatccagcttcagcctggactctctatgcagtggccacaacaattatcactcccatgatgagacacacaattgaaaacacaacggcaaatatttccctgacagctattgcaaaccaggcagctatattgatgggacttgacaagggatggccaatatcaaagatggacataggagttccacttctcgccttggggtgctattctcaggtgaacccgctgacgctgacagcggcggtattgatgctagtggctcattatgccataattggacccggactgcaagcaaaagctactagagaagctcaaaaaaggacagcagccggaataatgaaaaacccaactgtcgacgggatcgttgcaatagatttggaccctgtggtttacgatgcaaaatttgaaaaacagctaggccaaataatgttgttgatactttgcacatcacagatcctcctgatgcggaccacatgggccttgtgtgaatccatcacactagccactggacctctgactacgctttgggagggatctccaggaaaattctggaacaccacgatagcggtgtccatggcaaacatttttaggggaagttatctagcaggagcaggtctggccttttcattaatgaaatctctaggaggaggtaggagaggcacgggagcccaaggggaaacactgggagaaaaatggaaaagacagctaaaccaattgagcaagtcagaattcaacacttacaaaaggagtgggattatagaggtggatagatctgaagccaaagaggggttaaaaagaggagaaacgactaaacacgcagtgtcgagaggaacggccaaactgaggtggtttgtggagaggaaccttgtgaaaccagaagggaaagtcatagacctcggttgtggaagaggtggctggtcatattattgcgctgggctgaagaaagtcacagaagtgaaaggatacacgaaaggaggacctggacatgaggaaccaatcccaatggcaacctatggatggaacctagtaaagctatactccgggaaagatgtattctttacaccacctgagaaatgtgacaccctcttgtgtgatattggtgagtcctctccgaacccaactatagaagaaggaagaacgttacgtgttctaaagatggtggaaccatggctcagaggaaaccaattttgcataaaaattctaaatccctatatgccgagtgtggtagaaactttggagcaaatgcaaagaaaacatggaggaatgctagtgcgaaatccactctcaagaaactccactcatgaaatgtactgggtttcatgtggaacaggaaacattgtgtcagcagtaaacatgacatctagaatgctgctaaatcgattcacaatggctcacaggaagccaacatatgaaagagacgtggacttaggcgctggaacaagacatgtggcagtagaaccagaggtggccaacctagatatcattggccagaggatagagaatataaaaaatgaacacaaatcaacatggcattatgatgaggacaatccatacaaaacatgggcctatcatggatcatatgaggtcaagccatcaggatcagcctcatccatggtcaatggtgtggtgagactgctaaccaaaccatgggatgtcattcccatggtcacacaaatagccatgactgacaccacaccctttggacaacagagggtgtttaaagagaaagttgacacgcgtacaccaaaagcgaaacgaggcacagcacaaattatggaggtgacagccaggtggttatggggttttctctctagaaacaaaaaacccagaatctgcacaagagaggagttcacaagaaaagtcaggtcaaacgcagctattggagcagtgttcgttgatgaaaatcaatggaactcagcaaaagaggcagtggaagatgaacggttctgggaccttgtgcacagagagagggagcttcataaacaaggaaaatgtgccacgtgtgtctacaacatgatgggaaagagagagaaaaaattaggagagttcggaaaggcaaaaggaagtcgcgcaatatggtacatgtggttgggagcgcgctttttagagtttgaagcccttggtttcatgaatgaagatcactggttcagcagagagaattcactcagtggagtggaaggagaaggactccacaaacttggatacatactcagagacatatcaaagattccagggggaaatatgtatgcagatgacacagccggatgggacacaagaataacagaggatgatcttcagaatgaggccaaaatcactgacatcatggaacctgaacatgccctattggccacgtcaatctttaagctaacctaccaaaacaaggtagtaagggtgcagagaccagcgaaaaatggaaccgtgatggatgtcatatccagacgtgaccagagaggaagtggacaggttggaacctatggcttaaacaccttcaccaacatggaggcccaactaataagacaaatggagtctgagggaatcttttcacccagcgaattggaaaccccaaatctagccgaaagagtcctcgactggttgaaaaaacatggcaccgagaggctgaaaagaatggcaatcagtggagatgactgtgtggtgaaaccaatcgatgacagatttgcaacagccttaacagctttgaatgacatgggaaaggtaagaaaagacataccgcaatgggaaccttcaaaaggatggaatgattggcaacaagtgcctttctgttcacaccatttccaccagctgattatgaaggatgggagggagatagtggtgccatgccgcaaccaagatgaacttgtaggtagggccagagtatcacaaggcgccggatggagcttgagagaaactgcatgcctaggcaagtcatatgcacaaatgtggcagctgatgtacttccacaggagagacttgagattagcggctaatgctatctgttcagccgttccagttgattgggtcccaaccagccgcaccacctggtcgatccatgcccaccatcaatggatgacaacagaagacatgttgtcagtgtggaatagggtttggatagaggaaaacccatggatggaggacaagactcatgtgtccagttgggaagacgttccatacctaggaaaaagggaagatcaatggtgtggttccctaataggcttaacagcacgagccacctgggccaccaacatacaagtggccataaaccaagtgagaaggctcattgggaatgagaattatctagacttcatgacatcaatgaagagattcaaaaacgagagtgatcccgaaggggcactctggtaagccaactcattcacaaaataaaggaaaataaaaaatcaaacaaggcaagaagtcaggccggattaagccatagcacggtaagagctatgctgcctgtgagccccgtccaaggacgtaaaatgaagtcaggccgaaagccacggttcgagcaagccgtgctgcctgtagctccatcgtggggatgtaaaaacccgggaggctgcaaaccatggaagctgtacgcatggggtagcagactagtggttagaggagacccctcccaagacacaacgcagcagcggggcccaacaccaggggaagctgtaccctggtggtaaggactagaggttagaggagaccccccgcacaacaacaaacagcatattgacgctgggagagaccagagatcctgctgtctctacagcatcattccaggcacagaacgccaaaaaatggaatggtgctgttgaatcaacaggttct

SEQ ID NO: 241 - RNA, 10723 nt, unidentified
  source 1..10723: mol_type = genomic RNA; note = Dengue Virus
agttgttagtctacgtggaccgacaaagacagattctttgagggagctaagctcaacgtagttctaacagttttttaattagagagcagatctctgatgaataaccaacggaaaaaggcgaaaaacacgcctttcaatatgctgaaacgcgagagaaaccgcgtgtcgactgtgcaacagctgacaaagagattctcacttggaatgctgcagggacgaggaccattaaaactgttcatggccctggtggcgttccttcgtttcctaacaatcccaccaacagcagggatattgaagagatggggaacaattaaaaaatcaaaagctattaatgttttgagagggttcaggaaagagattggaaggatgctgaacatcttgaataggagacgcagatctgcaggcatgatcattatgctgattccaacagtgatggcgttccatttaaccacacgtaacggagaaccacacatgatcgtcagcagacaagagaaagggaaaagtcttctgtttaaaacagaggatggcgtgaacatgtgtaccctcatggccatggaccttggtgaattgtgtgaagacacaatcacgtacaagtgtccccttctcaggcagaatgagccagaagacatagactgttggtgcaactctacgtccacgtgggtaacttatgggacgtgtaccaccatgggagaacatagaagagaaaaaagatcagtggcactcgttccacatgtgggaatgggactggagacacgaactgaaacatggatgtcatcagaaggggcctggaaacatgtccagagaattgaaacttggatcttgagacatccaggcttcaccatgatggcagcaatcctggcatacaccataggaacgacacatttccaaagagccctgattttcatcttactgacagctgtcactccttcaatgacaatgcgttgcataggaatgtcaaatagagactttgtggaaggggtttcaggaggaagctgggttgacatagtcttagaacatggaagctgtgtgacgacgatggcaaaaaacaaaccaacattggattttgaactgataaaaacagaagccaaacagcctgccaccctaaggaagtactgtatagaggcaaagctaaccaacacaacaacagaatctcgctgcccaacacaaggggaacccagcctaaatgaagagcaggacaaaaggttcgtctgcaaacactccatggtagacagaggatggggaaatggatgtggactatttggaaagggaggcattgtgacctgtgctatgttcagatgcaaaaagaacatggaaggaaaagttgtgcaaccagaaaacttggaatacaccattgtgataacacctcactcaggggaagagcatgcagtcggaaatgacacaggaaaacatggcaaggaaatcaaaataacaccacagagttccatcacagaagcagaattgacaggttatggcactgtcacaatggagtgctctccaagaacgggcctcgacttcaatgagatggtgttgctgcagatggaaaataaagcttggctggtgcacaggcaatggttcctagacctgccgttaccatggttgcccggagcggacacacaagggtcaaattggatacagaaagagacattggtcactttcaaaaatccccatgcgaagaaacaggatgttgttgttttaggatcccaagaaggggccatgcacacagcacttacaggggccacagaaatccaaatgtcatcaggaaacttactcttcacaggacatctcaagtgcaggctgagaatggacaagctacagctcaaaggaatgtcatactctatgtgcacaggaaagtttaaagttgtgaaggaaatagcagaaacacaacatggaacaatagttatcagagtgcaatatgaaggggacggctctccatgcaagatcccttttgagataatggatttggaaaaaagacatgtcttaggtcgcctgattacagtcaacccaattgtgacagaaaaagatagcccagtcaacatagaagcagaacctccattcggagacagctacatcatcataggagtagagccgggacaactgaagctcaactggtttaagaaaggaagttctatcggccaaatgtttgagacaacaatgaggggggcgaagagaatggccattttaggtgacacagcctgggattttggatccttgggaggagtgtttacatctataggaaaggctctccaccaagtctttggagcaatctatggagctgccttcagtggggtttcatggactatgaaaatcctcataggagtcattatcacatggataggaatgaattcacgcagcacctcactgtctgtgacactagtattggtgggaattgtgacactgtatttgggagtcatggtgcaggccgatagtggttgcgttgtgagctggaaaaacaaagaactgaaatgtggcagtgggattttcatcacagacaacgtgcacacatggacagaacaatacaagttccaaccagaatccccttcaaaactagcttcagctatccagaaagcccatgaagagggcatttgtggaatccgctcagtaacaagactggagaatctgatgtggaaacaaataacaccagaattgaatcacattctatcagaaaatgaggtgaagttaactattatgacaggagacatcaaaggaatcatgcaggcaggaaaacgatctctgcggcctcagcccactgagctgaagtattcatggaaaacatggggcaaagcaaaaatgctctctacagagtctcataaccagacctttctcattgatggccccgaaacagcagaatgccccaacacaaatagagcttggaattcgttggaagttgaagactatggctttggagtattcaccaccaatatatggctaaaattgaaagaaaaacaggatgtattctgcgactcaaaactcatgtcagcggccataaaagacaacagagccgtccatgccgatatgggttattggatagaaagtgcactcaatgacacatggaagatagagaaagcctctttcattgaagttaaaaactgccactggccaaaatcacacaccctctggagcaatggagtgctagaaagtgagatgataattccaaagaatctcgctggaccagtgtctcaacacaactatagaccaggctaccatacacaaataacaggaccatggcatctaggtaagcttgagatggactttgatttctgtgatggaacaacagtggtagtgactgaggactgcggaaatagaggaccctctttgagaacaaccactgcctctggaaaactcataacagaatggtgctgccgatcttgcacattaccaccgctaagatacagaggtgaggatgggtgctggtacgggatggaaatcagaccattgaaggagaaagaagagaatttggtcaactccttggtcacagctggacatgggcaggtcgacaacttttcactaggagtcttgggaatggcattgttcctggaggaaatgcttaggacccgagtaggaacgaaacatgcaatactactagttgcagtttcttttgtgacattgatcacagggaacatgtcctttagagacctgggaagagtgatggttatggtaggcgccactatgacggatgacataggtatgggcgtgacttatcttgccctactagcagccttcaaagtcagaccaacttttgcagctggactactcttgagaaagctgacctccaaggaattgatgatgactactataggaattgtactcctctcccagagcaccataccagagaccattcttgagttgactgatgcgttagccttaggcatgatggtcctcaaaatggtgagaaatatggaaaagtatcaattggcagtgactatcatggctatcttgtgcgtcccaaacgcagtgatattacaaaacgcatggaaagtgagttgcacaatattggcagtggtgtccgtttccccactgctcttaacatcctcacagcaaaaaacagattggataccattagcattgacgatcaaaggtctcaatccaacagctatttttctaacaaccctctcaagaaccagcaagaaaaggagctggccattaaatgaggctatcatggcagtcgggatggtgagcattttagccagttctctcctaaaaaatgatattcccatgacaggaccattagtggctggagggctcctcactgtgtgctacgtgctcactggacgatcggccgatttggaactggagagagcagccgatgtcaaatgggaagaccaggcagagatatcaggaagcagtccaatcctgtcaataacaatatcagaagatggtagcatgtcgataaaaaatgaagaggaagaacaaacactgaccatactcattagaacaggattgctggtgatctcaggactttttcctgtatcaataccaatcacggcagcagcatggtacctgtgggaagtgaagaaacaacgggccggagtattgtgggatgttccttcacccccacccatgggaaaggctgaactggaagatggagcctatagaattaagcaaaaagggattcttggatattcccagatcggagccggagtttacaaagaaggaacattccatacaatgtggcatgtcacacgtggcgctgttctaatgcataaaggaaagaggattgaaccatcatgggcggacgtcaagaaagacctaatatcatatggaggaggctggaagttagaaggagaatggaaggaaggagaagaagtccaggtattggcactggagcctggaaaaaatccaagagccgtccaaacgaaacctggtcttttcaaaaccaacgccggaacaataggtgctgtatctctggacttttctcctggaacgtcaggatctccaattatcgacaaaaaaggaaaagttgtgggtctttatggtaatggtgttgttacaaggagtggagcatatgtgagtgctatagcccagactgaaaaaagcattgaagacaacccagagatcgaagatgacattttccgaaagagaagactgaccatcatggacctccacccaggagcgggaaagacgaagagataccttccggccatagtcagagaagctataaaacggggtttgagaacattaatcttggcccccactagagttgtggcagctgaaatggaggaagcccttagaggacttccaataagataccagaccccagccatcagagctgagcacaccgggcgggagattgtggacctaatgtgtcatgccacatttaccatgaggctgctatcaccagttagagtgccaaactacaacctgattatcatggacgaagcccatttcacagacccagcaagtatagcagctagaggatacatctcaactcgagtggagatgggtgaggcagctgggatttttatgacagccactcccccgggaagcagagacccatttcctcagagcaatgcaccaatcatagatgaagaaagagaaatccctgaacgttcgtggaattccggacatgaatgggtcacggattttaaagggaagactgtttggttcgttccaagtataaaagcaggaaatgatatagcagcttgcctgaggaaaaatggaaagaaagtgatacaactcagtaggaagacctttgattctgagtatgtcaagactagaaccaatgattgggacttcgtggttacaactgacatttcagaaatgggtgccaatttcaaggctgagagggttatagaccccagacgctgcatgaaaccagtcatactaacagatggtgaagagcgggtgattctggcaggacctatgccagtgacccactctagtgcagcacaaagaagagggagaataggaagaaatccaaaaaatgagaatgaccagtacatatacatgggggaacctctggaaaatgatgaagactgtgcacactggaaagaagctaaaatgctcctagataacatcaacacgccagaaggaatcattcctagcatgttcgaaccagagcgtgaaaaggtggatgccattgatggcgaataccgcttgagaggagaagcaaggaaaacctttgtagacttaatgagaagaggagacctaccagtctggttggcctacagagtggcagctgaaggcatcaactacgcagacagaaggtggtgttttgatggagtcaagaacaaccaaatcctagaagaaaacgtggaagttgaaatctggacaaaagaaggggaaaggaagaaattgaaacccagatggttggatgctaggatctattctgacccactggcgctaaaagaatttaaggaatttgcagccggaagaaagtctctgaccctgaacctaatcacagaaatgggtaggctcccaaccttcatgactcagaaggcaagagacgcactggacaacttagcagtgctgcacacggctgaggcaggtggaagggcgtacaaccatgctctcagtgaactgccggagaccctggagacattgcttttactgacacttctggctacagtcacgggagggatctttttattcttgatgagcggaaggggcatagggaagatgaccctgggaatgtgctgcataatcacggctagcatcctcctatggtacgcacaaatacagccacactggatagcagcttcaataatactggagttttttctcatagttttgcttattccagaacctgaaaaacagagaacaccccaagacaaccaactgacctacgttgtcatagccatcctcacagtggtggccgcaaccatggcaaacgagatgggtttcctagaaaaaacgaagaaagatctcggattgggaagcattgcaacccagcaacccgagagcaacatcctggacatagatctacgtcctgcatcagcatggacgctgtatgccgtggccacaacatttgttacaccaatgttgagacatagcattgaaaattcctcagtgaatgtgtccctaacagctatagccaaccaagccacagtgttaatgggtctcgggaaaggatggccattgtcaaagatggacatcggagttccccttctcgccattggatgctactcacaagtcaaccccataactctcacagcagctcttttcttattggtagcacattatgccatcatagggccaggactccaagcaaaagcaaccagagaagctcagaaaagagcagcggcgggcatcatgaaaaacccaactgtcgatggaataacagtgattgacctagatccaataccttatgatccaaagtttgaaaagcagttgggacaagtaatgctcctagtcctctgcgtgactcaagtattgatgatgaggactacatgggctctgtgtgaggctttaaccttagctaccgggcccatctccacattgtgggaaggaaatccagggaggttttggaacactaccattgcggtgtcaatggctaacatttttagagggagttacttggccggagctggacttctcttttctattatgaagaacacaaccaacacaagaaggggaactggcaacataggagagacgcttggagagaaatggaaaagccgattgaacgcattgggaaaaagtgaattccagatctacaagaaaagtggaatccaggaagtggatagaaccttagcaaaagaaggcattaaaagaggagaaacggaccatcacgctgtgtcgcgaggctcagcaaaactgagatggttcgttgagagaaacatggtcacaccagaagggaaagtagtggacctcggttgtggcagaggaggctggtcatactattgtggaggactaaagaatgtaagagaagtcaaaggcctaacaaaaggaggaccaggacacgaagaacccatccccatgtcaacatatgggtggaatctagtgcgtcttcaaagtggagttgacgttttcttcatcccgccagaaaagtgtgacacattattgtgtgacataggggagtcatcaccaaatcccacagtggaagcaggacgaacactcagagtccttaacttagtagaaaattggttgaacaacaacactcaattttgcataaaggttctcaacccatatatgccctcagtcatagaaaaaatggaagcactacaaaggaaatatggaggagccttagtgaggaatccactctcacgaaactccacacatgagatgtactgggtatccaatgcttccgggaacatagtgtcatcagtgaacatgatttcaaggatgttgatcaacagatttacaatgagatacaagaaagccacttacgagccggatgttgacctcggaagcggaacccgtaacatcgggattgaaagtgagataccaaacctagatataattgggaaaagaatagaaaaaataaagcaagagcatgaaacatcatggcactatgaccaagaccacccatacaaaacgtgggcataccatggtagctatgaaacaaaacagactggatcagcatcatccatggtcaacggagtggtcaggctgctgacaaaaccttgggacgtcgtccccatggtgacacagatggcaatgacagacacgactccatttggacaacagcgcgtttttaaagagaaagtggacacgagaacccaagaaccgaaagaaggcacgaagaaactaatgaaaataacagcagagtggctttggaaagaattagggaagaaaaagacacccaggatgtgcaccagagaagaattcacaagaaaggtgagaagcaatgcagccttgggggccatattcactgatgagaacaagtggaagtcggcacgtgaggctgttgaagatagtaggttttgggagctggttgacaaggaaaggaatctccatcttgaaggaaagtgtgaaacatgtgtgtacaacatgatgggaaaaagagagaagaagctaggggaattcggcaaggcaaaaggcagcagagccatatggtacatgtggcttggagcacgcttcttagagtttgaagccctaggattcttaaatgaagatcactggttctccagagagaactccctgagtggagtggaaggagaagggctgcacaagctaggttacattctaagagacgtgagcaagaaagagggaggagcaatgtatgccgatgacaccgcaggatgggatacaagaatcacactagaagacctaaaaaatgaagaaatggtaacaaaccacatggaaggagaacacaagaaactagccgaggccattttcaaactaacgtaccaaaacaaggtggtgcgtgtgcaaagaccaacaccaagaggcacagtaatggacatcatatcgagaagagaccaaagaggtagtggacaagttggcacctatggactcaatactttcaccaatatggaagcccaactaatcagacagatggagggagaaggagtctttaaaagcattcagcacctaacaatcacagaagaaatcgctgtgcaaaactggttagcaagagtggggcgcgaaaggttatcaagaatggccatcagtggagatgattgtgttgtgaaacctttagatgacaggttcgcaagcgctttaacagctctaaatgacatgggaaagattaggaaagacatacaacaatgggaaccttcaagaggatggaatgattggacacaagtgcccttctgttcacaccatttccatgagttaatcatgaaagacggtcgcgtactcgttgttccatgtagaaaccaagatgaactgattggcagagcccgaatctcccaaggagcagggtggtctttgcgggagacggcctgtttggggaagtcttacgcccaaatgtggagcttgatgtacttccacagacgcgacctcaggctggcggcaaatgctatttgctcggcagtaccatcacattgggttccaacaagtcgaacaacctggtccatacatgctaaacatgaatggatgacaacggaagacatgctgacagtctggaacagggtgtggattcaagaaaacccatggatggaagacaaaactccagtggaatcatgggaggaaatcccatacttggggaaaagagaagaccaatggtgcggctcattgattgggttaacaagcagggccacctgggcaaagaacatccaagcagcaataaatcaagttagatcccttataggcaatgaagaatacacagattacatgccatccatgaaaagattcagaagagaagaggaagaagcaggagttctgtggtagaaagcaaaactaacatgaaacaaggctagaagtcaggtcggattaagccatagtacggaaaaaactatgctacctgtgagccccgtccaaggacgttaaaagaagtcaggccatcataaatgccatagcttgagtaaactatgcagcctgtagctccacctgagaaggtgtaaaaaatccgggaggccacaaaccatggaagctgtacgcatggcgtagtggactagcggttagaggagacccctcccttacaaatcgcagcaacaatgggggcccaaggcgagatgaagctgtagtctcgctggaaggactagaggttagaggagacccccccgaaacaaaaaacagcatattgacgctgggaaagaccagagatcctgctgtctcctcagcatcattccaggcacagaacgccagaaaatggaatggtgctgttgaatcaacaggttct

SEQ ID NO: 242 - RNA, 10707 nt, unidentified
  source 1..10707: mol_type = genomic RNA; note = Dengue Virus
agttgttagtctacgtggaccgacaagaacagtttcgactcggaagcttgcttaacgtagtgctgacagttttttattagagagcagatctctgatgaacaaccaacggaagaagacgggaaaaccgtctatcaatatgctgaaacgcgtgagaaaccgtgtgtcaactggatcacagttggcgaagagattctcaaaaggactgctgaacggccagggaccaatgaaattggttatggcgttcatagctttcctcagatttctagccattccaccaacagcaggagtcttggctagatggggaaccttcaagaagtcgggggccattaaggtcctgaaaggcttcaagaaggagatctcaaacatgctgagcataatcaaccaacggaaaaagacatcgctctgtctcatgatgatattgccagcagcacttgctttccacttgacttcacgagatggagagccgcgcatgattgtggggaagaatgaaagaggtaaatccctactttttaagacagcctctggaatcaacatgtgcacactcatagccatggatttgggagagatgtgtgatgacacggtcacttacaaatgcccccacattaccgaagtggaacctgaagacattgactgctggtgcaaccttacatcaacatgggtgacttatggaacgtgcaatcaagctggagagcatagacgcgacaagagatcagtggcgttagctccccatgtcggcatgggactggacacacgcacccaaacctggatgtcggctgaaggagcttggagacaagtcgagaaggtagagacatgggcccttaggcacccagggttcaccatactagccctatttctcgcccattacataggcacttccctgacccagaaggtggttattttcatattattaatgctggtcaccccatccatgacaatgagatgtgtgggagtaggaaacagagattttgtggaagggctatcaggagctacgtgggttgacgtggtgctcgagcacggggggtgtgtgactaccatggctaagaacaagcccacgctggatatagagcttcagaagaccgaggccacccaactggcgaccctaaggaagctatgcattgaggggaaaattaccaacataacaactgactcaagatgtcctacccaaggggaagcggttttgcctgaggagcaggaccagaactacgtgtgtaagcatacatacgtagacagaggttgggggaacggttgtggtttgtttggcaaaggaagcttggtaacatgtgcgaaatttcaatgcctggaaccaatagagggaaaagtggtgcaatatgagaacctcaaatacaccgtcatcattacagtgcacacaggagaccaacaccaggtgggaaatgaaacgcaaggagtcacggctgagataacacctcaggcatcaaccactgaagccatcttgcctgaatatggaacccttgggctagaatgctcaccacggacaggtttggatttcaatgaaatgatcttactaacaatgaagaacaaagcatggatggtacatagacaatggttctttgacctacctctaccatgggcatcaggagctacaacagaaacaccaacctggaacaggaaggagcttcttgtgacattcaaaaacgcacatgcgaaaaaacaagaagtagttgtccttggatcgcaagagggagcaatgcataccgcactgacaggagctacagaaatccaaaactcaggaggcacaagcattttcgcggggcacttaaaatgtagacttaagatggacaaattggaactcaaggggatgagctatgcaatgtgcacgaatacctttgtgttgaagaaagaagtctcagaaacgcagcacgggacaatactcattaaggttgagtacaaaggggaagatgcaccttgcaagattcccttttccacagaggatggacaagggaaagctcataatggcagactgatcacagccaaccctgtggtgactaagaaggaggagcctgtcaatattgaggctgaacctccttttggggaaagcaatatagtaattggaattggagacaacgccttgaaaatcaactggtacaagaaggggagctcgattgggaagatgttcgaggccactgaaaggggtgcaaggcgcatggccatcttgggagacacagcttgggactttggatcagtgggtggtgttctgaactcattaggcaaaatggtgcaccaaatatttggaagtgcttatacagccctgttcagtggagtctcttgggtgatgaaaattggaataggtgtcctcttgacttggatagggttgaattcaaaaaacacatccatgtcattttcatgcattgcgataggaatcattacactctatctgggagctgtggtacaagctgacatggggtgtgtcataaactggaagggcaaagaactcaaatgtggaagcggaattttcgtcaccaatgaggtccatacctggacagagcaatacaaattccaagcagactccccaaaaagattggcaacagccattgcaggcgcctgggagaatggagtgtgtggaattaggtcaacaaccagaatggagaatctcttgtggaagcaaatagccaatgaactgaactacatattatgggaaaacaatatcaaattaacggtagttgtgggcgatacacttggggtcttagagcaagggaaaagaacactaacaccacaacccatggagctaaaatactcatggaaaacgtggggaaaggcaaaaatagtgacagctgaaacacaaaattcctctttcataatagacgggccaaacacaccggagtgtccaagtgcctcaagagcatggaatgtgtgggaggtggaagattacgggttcggagtcttcacaaccaacatatggctgaaactccgagaggtctacacccaactatgtgaccataggctaatgtcggcagctgtcaaggatgagagggccgtgcatgccgacatgggctactggatagaaagccaaaagaatggaagttggaagctagaaaaagcatccctcatagaggtaaaaacctgcacatggccaaaatcacacactctctggactaatggtgtgctagagagtgacatgatcatcccaaagagtctagctggtcctatctcacaacacaactacaggcccgggtaccacacccaaacggcaggaccctggcacttaggaaaattggagctggacttcaactactgtgaaggaacaacagttgtcatcacagaaagctgtgggacaagaggcccatcattgagaacaacaacagtgtcagggaagttgatacacgaatggtgttgccgctcgtgcacacttccccccctgcgatacatgggagaagacggctgctggtatggcatggaaatcagacccatcagtgagaaagaagagaacatggtaaagtctttagtctcagcgggaagtggaaaggtggacaacttcacaatgggtgtcttgtgtttggcaatcctctttgaagaggtgttgagaggaaaatttgggaagaaacacatgattgcaggggttttctttacgtttgtgctccttctctcagggcaaataacatggagagacatggcgcacacactaataatgatcgggtccaacgcctctgacaggatgggaatgggcgtcacctacctagctctaattgcaacatttaaaatccagccattcttggctttgggatttttcctaagaaagctgacatctagagaaaatttattgttaggagttgggttggccatggcaacaacgttacaactgccagaggacattgaacaaatggcaaatggagtcgctctggggctcatggctcttaaactgataacacaatttgaaacataccaattgtggacggcattagtctccttaacgtgttcaaacacaatttttacgttgactgttgcctggagaacagccactctgattttggccggagtttcgcttttaccagtgtgccagtcttcaagcatgaggaaaacagattggctcccaatgacagtggcagctatgggagttccaccccttccactttttatttttagcttgaaagacacactcaaaaggagaagctggccactgaatgaaggggtgatggctgttgggcttgtgagcattctggccagttctctccttagaaatgatgtgcccatggctggaccattagtggccgggggcttgctgatagcgtgctacgtcataactggcacgtcagcggacctcactgtagaaaaagccccagatgtaacatgggaggaagaggctgagcagacaggagtgtcccacaacttaatgatcacagttgatgatgatggaacaatgagaataaaagatgatgagactgagaacatcctaacagtgcttttaaaaacagcattactaatagtatcaggcatttttccatactccatacccgcaacattgttggtctggcacacttggcaaaaacaaacccaaagatccggcgttttatgggacgtacccagccccccagagacacagaaagcagaactggaagaaggggtttataggatcaaacagcaaggaatttttgggaaaacccaagtaggggttggagtacagaaagaaggagtcttccacaccatgtggcacgtcacaagaggggcagtgttgacacataatgggaaaagactggaaccaaactgggctagtgtgaaaaaagatctgatttcatatggaggaggatggagactgagcgcacaatggcaaaagggggaggaggtgcaggttattgccgtagagccagggaagaacccaaagaactttcaaaccacgccaggcactttccagactactacaggggaaataggagcaattgcactggatttcaagcctggaacttcaggatctcctatcataaatagagagggaaaggtagtgggactgtatggcaatggagtggttacaaagaatggtggctatgtcagcggaatagcgcaaacaaatgcagaaccagatggaccgacaccagagttggaagaagagatgttcaaaaagcgaaacctgaccataatggatcttcatcctgggtcaggaaagacacggaaataccttccagctattgtcagagaggcaatcaagagacgtttaagaaccttaattttggcaccgacaagggtggttgcagctgagatggaagaagcattgaaagggctcccaataaggtaccaaacaacagcaacaaaatctgaacacacaggaagagagattgttgatctaatgtgccacgcaacgttcacaatgcgtttgctgtcaccagttagggttccaaattacaacttgataataatggatgaggcccatttcacagacccagccagtatagcggctagagggtacatatcaactcgtgttggaatgggagaggcagccgcaatcttcatgacagcaacaccccctggaacagctgatgcctttcctcagagcaacgctccaattcaagatgaagaaagggacataccagaacgctcatggaattcaggcaatgaatggattaccgacttcgctgggaaaacggtgtggtttgtccctagcattaaagccggaaatgacatagcaaactgcttgcgaaaaaacgggaaaaaagtcattcaacttagtaggaagacttttgacacagaatatcagaagactaaactgaatgattgggactttgtggtgacaactgacatttcagaaatgggggccaatttcaaagcagatagagtgatcgacccaagaagatgtctcaaaccagtgatcttgacagatggaccagagcgggtgatcctggccggaccaatgccagtcaccgcggcgagtgctgcgcaaaggagagggagagttggcaggaacccacaaaaagagaatgaccagtacatattcacgggccagcctctcaacaatgatgaagaccatgctcactggacagaagcaaaaatgctgctggacaacatcaacacaccagaagggattataccagctctctttgaaccagaaagggagaagtcagccgccatagacggtgagtatcgcctgaagggtgagtccaggaagactttcgtggaactcatgaggaggggtgaccttccagtttggttagcccataaagtagcatcagaaggaatcaaatacacagatagaaaatggtgctttgatgggcaacgcaataatcaaattttagaggagaacatggatgtggaaatttggacaaaggaaggagaaaagaaaaaattgagacctaggtggcttgatgcccgcacttattcagatccattggcactcaaggaattcaaggactttgcggctggcagaaagtcaatcgcccttgatcttgtgacagaaataggaagagtgccttcacatctagcccacagaacaagaaacgctctggacaatctggtgatgctgcatacgtcagaagatggcggtagggcttacaggcatgcggtggaggaactaccagaaacaatggaaacactcctactcttgggactaatgatcttgttgacaggtggagcaatgcttttcttgatatcaggtaaagggattggaaagacttcaataggactcatttgtgtaatcgcttccagcggcatgttgtggatggccgaagttccactccaatggatcgcgtcggctatagtcctggagttttttatgatggtgttgctcataccagaaccagaaaagcagagaaccccccaagacaaccaactcgcatatgtcgtgataggcatacttacattggctgcaacaatagcagccaatgaaatgggactgctggaaaccacaaagagagacttaggaatgtctaaggagccaggtgttgtttctccaaccagctatttggatgtggacttgcacccagcatcagcctggacattgtacgccgtggccactacagtaataacaccaatgttaagacataccatagagaattctacagcaaatgtgtccctggcagctatagccaaccaggcagtggtcctgatgggtttggacaaaggatggccaatatcaaaaatggacttaggcgtgccactactggcactgggttgctattcacaagtgaacccactgactctaactgcggcagtacttttgctaatcacacattatgctatcataggtccaggattgcaagcaaaagccacccgtgaagctcagaaaaggacagctgctggaataatgaagaatccaacagtggatgggataatgacaatagacctagattctgtaatatttgattcaaaatttgaaaaacaactgggacaggttatgctcctggttttgtgcgcagtccaactcttgctaatgagaacatcatgggccttgtgtgaagctttaactctagctacaggaccaataacaacactctgggaaggatcacctggtaagttctggaacaccacgatagctgtttccatggcgaacatttttagagggagctatttagcaggagctgggcttgctttttctattatgaaatcagttggaacaggaaaaagaggaacaggctcacaaggtgaaactttaggagaaaaatggaaaaagaaattaaatcaattatcccggaaagagtttgacctttacaagaaatctggaatcactgaagtggatagaacagaagccaaagaagggttgaaaagaggagagacaacacatcatgccgtgtcccgaggtagcgcaaaacttcaatggtttgtggaaagaaacatggtcgttcccgaaggaagagtcatagacttgggctgtggaagaggaggctggtcatattactgtgcaggactgaaaaaagtcacagaagtgcgaggatacacaaaaggcggtccaggacacgaagaaccagtacctatgtctacatatggatggaacatagttaagttaatgagcggaaaggatgtgttctatctcccacctgaaaagtgtgataccctgttgtgtgacattggagaatcttcaccaagcccaacagtggaagagagcagaactataagagttttgaagatggttgaaccatggctaaaaaacaaccagttttgcattaaagttttgaacccttacatgccaactgtgattgagcacctagaaagactacaaaggaaacatggaggaatgcttgtgagaaatccactttcacgaaactccacgcacgaaatgtactggatatctaatggcacaggtaacattgtctcttcagtcaacatggtgtctagattgctactgaacaggttcacgatgacacacaggagacccaccatagagaaagatgtggatttaggagcaggaactcgacatgttaatgcggaaccagaaacacccaacatggatgtcattggggaaagaataaaaaggatcaaggaggagcataattcaacatggcactatgatgacgaaaacccctacaaaacgtgggcttaccatggatcctatgaagtcaaagccacaggctcagcctcctccatgataaatggagtcgtgaaactcctcaccaaaccatgggatgtggtgcccatggtgacacagatggcaatgacagacacaactccatttggccagcagagagtctttaaagagaaagtggacaccaggacgcccaggcccatgccagggacaagaaaggctatggagatcacagcggagtggctctggagaaccctgggaaggaacaaaagacccagattatgcacaagggaagagtttacaaaaaaggtcagaactaacgcagccatgggcgccgttttcacagaggagaaccaatgggacagtgcgaaagctgctgttgaggatgaagaattttggaaacttgtggacagagaacgtgaactccacaaattgggcaaatgtggaagctgcgtttataacatgatgggcaagagagagaaaaaacttggagagtttggcaaagcaaaaggcagtagagctatatggtacatgtggttgggagccaggtaccttgagttcgaagcccttggattcttaaatgaagaccactggttctcgcgtgaaaactcttacagtggagtagaaggagaaggactgcacaagctaggctacatattaagggacatttccaagatacccggaggagccatgtatgctgatgacacagctggttgggacacaagaataacagaagatgacctgcacaatgaggaaaagatcatacagcaaatggaccctgaacacaggcagttagcgaacgctatattcaagctcacataccaaaacaaagtggtcaaagttcaacgaccgactccaacgggcacggtaatggatattatatctaggaaagaccaaaggggcagtggacaactgggaacttatggcctgaatacattcaccaacatggaagcccagttagtcagacaaatggaaggagaaggtgtgctgacaaaggcagacctcgagaaccctcatctgctagagaagaaaatcacacaatggttggaaaccaaaggagtggagaggttaaaaagaatggccattagcggggatgattgcgtggtgaaaccaatcgatgacaggttcgctaatgccctgcttgctttgaacgatatgggaaaggttcggaaagacatacctcaatggcagccatcaaagggatggcatgattggcaacaggttcctttctgctcccaccactttcatgaattgatcatgaaagatggaagaaagttggtggttccctgcagaccccaggacgaactaataggaagagcaagaatctctcaaggagcgggatggagccttagagaaactgcatgtctggggaaagcctacgcccaaatgtggagtctcatgtattttcacagaagagatctcagattagcatccaacgccatatgttcagcagtaccagtccactgggttcccacaagtagaacgacatggtctattcatgctcaccatcagtggatgactacagaagacatgcttactgtttggaacagggtgtggatagaggaaaatccatggatggaagacaaaactccagttacaacttgggaaaatgttccatatctaggaaagagagaagaccaatggtgtggatcacttattggtctcacttccagagcaacctgggcccagaacatacccacagcaattcaacaggtgagaagccttataggcaatgaagagttcctggactacatgccttcaatgaagagattcaggaaggaagaggagtcggagggagccatttggtaaacgtaggaagtggaaaagaggctaactgtcaggccaccttaagccacagtacggaagaagctgtgctgcctgtgagccccgtccaaggacgttaaaagaagaagtcaggccccaaagccacggtttgagcaaaccgtgctgcctgtagctccgtcgtggggacgtaaaacctgggaggctgcaaactgtggaagctgtacgcacggtgtagcagactagcggttagaggagacccctcccatgacacaacgcagcagcggggcccgagcactgagggaagctgtacctccttgcaaaggactagaggttagaggagaccccccgcaaataaaaacagcatattgacgctgggagagaccagagatcctgctgtctcctcagcatcattccaggcacagaacgccagaaaatggaatggtgctgttgaatcaacaggttct

SEQ ID NO: 243 - RNA, 10649 nt, unidentified
  source 1..10649: mol_type = genomic RNA; note = Dengue Virus
agttgttagtctgtgtggaccgacaaggacagttccaaatcggaagcttgcttaacacagttctaacagtttgtttgaatagagagcagatctctggaaaaatgaaccaacgaaaaaaggtggttagaccacctttcaatatgctgaaacgcgagagaaaccgcgtatcaacccctcaagggttggtgaagagattctcaaccggacttttttctgggaaaggacccttacggatggtgctagcattcatcacgtttttgcgagtcctttccatcccaccaacagcagggattctgaagagatggggacagttgaagaaaaataaggccatcaagatactgattggattcaggaaggagataggccgcatgctgaacatcttgaacgggagaaaaaggtcaacgataacattgctgtgcttgattcccaccgtaatggcgttttccctcagcacaagagatggcgaacccctcatgatagtggcaaaacatgaaagggggagacctctcttgtttaagacaacagaggggatcaacaaatgcactctcattgccatggacttgggtgaaatgtgtgaggacactgtcacgtataaatgccccctactggtcaataccgaacctgaagacattgattgctggtgcaacctcacgtctacctgggtcatgtatgggacatgcacccagagcggagaacggagacgagagaagcgctcagtagctttaacaccacattcaggaatgggattggaaacaagagctgagacatggatgtcatcggaaggggcttggaagcatgctcagagagtagagagctggatactcagaaacccaggattcgcgctcttggcaggatttatggcttatatgattgggcaaacaggaatccagcgaactgtcttctttgtcctaatgatgctggtcgccccatcctacggaatgcgatgcgtaggagtaggaaacagagactttgtggaaggagtctcaggtggagcatgggtcgacctggtgctagaacatggaggatgcgtcacaaccatggcccagggaaaaccaaccttggattttgaactgactaagacaacagccaaggaagtggctctgttaagaacctattgcattgaagcctcaatatcaaacataactacggcaacaagatgtccaacgcaaggagagccttatctgaaagaggaacaggaccaacagtacatttgccggagagatgtggtagacagagggtggggcaatggctgtggcttgtttggaaaaggaggagttgtgacatgtgcgaagttttcatgttcggggaagataacaggcaatttggtccaaattgagaaccttgaatacacagtggttgtaacagtccacaatggagacacccatgcagtaggaaatgacacatccaatcatggagttacagccatgataactcccaggtcaccatcggtggaagtcaaattgccggactatggagaactaacactcgattgtgaacccaggtctggaattgactttaatgagatgattctgatgaaaatgaaaaagaaaacatggctcgtgcataagcaatggtttttggatctgcctcttccatggacagcaggagcagacacatcagaggttcactggaattacaaagagagaatggtgacatttaaggttcctcatgccaagagacaggatgtgacagtgctgggatctcaggaaggagccatgcattctgccctcgctggagccacagaagtggactccggtgatggaaatcacatgtttgcaggacatcttaagtgcaaagtccgtatggagaaattgagaatcaagggaatgtcatacacgatgtgttcaggaaagttttcaattgacaaagagatggcagaaacacagcatgggacaacagtggtgaaagtcaagtatgaaggtgctggagctccgtgtaaagtccccatagagataagagatgtaaacaaggaaaaagtggttgggcgtatcatctcatccacccctttggctgagaataccaacagtgtaaccaacatagaattagaacccccctttggggacagctacatagtgataggtgttggaaacagcgcattaacactccattggttcaggaaagggagttccattggcaagatgtttgagtccacatacagaggtgcaaaacgaatggccattctaggtgaaacagcttgggattttggttccgttggtggactgttcacatcattgggaaaggctgtgcaccaggtttttggaagtgtgtatacaaccatgtttggaggagtctcatggatgattagaatcctaattgggttcttagtgttgtggattggcacgaactcgaggaacacttcaatggctatgacgtgcatagctgttggaggaatcactctgtttctgggcttcacagttcaagcagacatgggttgtgtggcgtcatggagtgggaaagaattgaagtgtggaagcggaatttttgtggttgacaacgtgcacacttggacagaacagtacaaatttcaaccagagtccccagcgagactagcgtctgcaatattaaatgcccacaaagatggggtctgtggaattagatcaaccacgaggctggaaaatgtcatgtggaagcaaataaccaacgagctaaactatgttctctgggaaggaggacatgacctcactgtagtggctggggatgtgaagggggtgttgaccaaaggcaagagagcactcacacccccagtgagtgatctgaaatattcatggaagacatggggaaaagcaaaaatcttcaccccagaagcaagaaatagcacatttttaatagacggaccagacacctctgaatgccccaatgaacgaagagcatggaactctcttgaggtggaagactatggatttggcatgttcacgaccaacatatggatgaaattccgagaaggaagttcagaagtgtgtgaccacaggttaatgtcagctgcaattaaagatcagaaagctgtgcatgctgacatgggttattggatagagagctcaaaaaaccagacctggcagatagagaaagcatctcttattgaagtgaaaacatgtctgtggcccaagacccacacactgtggagcaatggagtgctggaaagccagatgctcattccaaaatcatatgcgggccctttttcacagcacaattaccgccagggctatgccacgcaaaccgtgggcccatggcacttaggcaaattagagatagactttggagaatgccccggaacaacagtcacaattcaggaggattgtgaccatagaggcccatctttgaggaccaccactgcatctggaaaactagtcacgcaatggtgctgccgctcctgcacgatgcctcccttaaggttcttgggagaagatgggtgctggtatgggatggagattaggcccttgagtgaaaaagaagagaacatggtcaaatcacaggtgacggccggacagggcacatcagaaactttttctatgggtctgttgtgcctgaccttgtttgtggaagaatgcttgaggagaagagtcactaggaaacacatgatattagttgtggtgatcactctttgtgctatcatcctgggaggcctcacatggatggacttactacgagccctcatcatgttgggggacactatgtctggtagaataggaggacagatccacctagccatcatggcagtgttcaagatgtcaccaggatacgtgctgggtgtgtttttaaggaaactcacttcaagagagacagcactaatggtaataggaatggccatgacaacggtgctttcaattccacatgaccttatggaactcattgatggaatatcactgggactaattttgctaaaaatagtaacacagtttgacaacacccaagtgggaaccttagctctttccttgactttcataagatcaacaatgccattggtcatggcttggaggaccattatggctgtgttgtttgtggtcacactcattcctttgtgcaggacaagctgtcttcaaaaacagtctcattgggtagaaataacagcactcatcctaggagcccaagctctgccagtgtacctaatgactcttatgaaaggagcctcaagaagatcttggcctcttaacgagggcataatggctgtgggtttggttagtctcttaggaagcgctcttttaaagaatgatgtccctttagctggcccaatggtggcaggaggcttacttctggcggcttacgtgatgagtggtagctcagcagatctgtcactagagaaggccgccaacgtgcagtgggatgaaatggcagacataacaggctcaagcccaatcgtagaagtgaagcaggatgaagatggctctttctccatacgggacgtcgaggaaaccaatatgataacccttttggtgaaactggcactgataacagtgtcaggtctctaccccttggcaattccagtcacaatgaccttatggtacatgtggcaagtgaaaacacaaagatcaggagccctgtgggacgtcccctcacccgctgccactaaaaaagccgcactgtctgaaggagtgtacaggatcatgcaaagagggttattcgggaaaactcaggttggagtagggatacacatggaaggtgtatttcacacaatgtggcatgtaacaagaggatcagtgatctgccacgagactgggagattggagccatcttgggctgacgtcaggaatgacatgatatcatacggtgggggatggaggcttggagacaaatgggacaaagaagaagacgttcaggtcctcgccatagaaccaggaaaaaatcctaaacatgtccaaacgaaacctggccttttcaagaccctaactggagaaattggagcagtaacattagatttcaaacccggaacgtctggttctcccatcatcaacaggaaaggaaaagtcatcggactctatggaaatggagtagttaccaaatcaggtgattacgtcagtgccataacgcaagccgaaagaattggagagccagattatgaagtggatgaggacatttttcgaaagaaaagattaactataatggacttacaccccggagctggaaagacaaaaagaattcttccatcaatagtgagagaagccttaaaaaggaggctacgaactttgattttagctcccacgagagtggtggcggccgagatggaagaggccctacgtggactgccaatccgttatcagaccccagctgtgaaatcagaacacacaggaagagagattgtagacctcatgtgtcatgcaaccttcacaacaagacttttgtcatcaaccagggttccaaattacaaccttatagtgatggatgaagcacatttcaccgatccttctagtgtcgcggctagaggatacatctcgaccagggtggaaatgggagaggcagcagccatcttcatgaccgcaacccctcccggagcgacagatccctttccccagagcaacagcccaatagaagacatcgagagggaaattccggaaaggtcatggaacacagggttcgactggataacagactaccaagggaaaactgtgtggtttgttcccagcataaaagctggaaatgacattgcaaattgtttgagaaagtcgggaaagaaagttatccagttgagtaggaaaacctttgatacagagtatccaaaaacgaaactcacggactgggactttgtggtcactacagacatatctgaaatgggggccaattttagagccgggagagtgatagaccctagaagatgcctcaagccagttatcctaccagatgggccagagagagtcattttagcaggtcctattccagtgactccagcaagcgctgctcagagaagagggcgaataggaaggaacccagcacaagaagacgaccaatacgttttctccggagacccactaaaaaatgatgaagatcatgcccactggacagaagcaaagatgctgcttgacaatatctacaccccagaagggatcattccaacattgtttggtccggaaagggaaaaaacccaagccattgatggagagtttcgcctcagaggggaacaaaggaagacttttgtggaattaatgaggagaggagaccttccggtgtggctgagctataaggtagcttctgctggcatttcttacgaagatcgggaatggtgcttcacaggggaaagaaataaccaaattttagaagaaaacatggaggttgaaatttggactagagagggagaaaagaaaaagctaaggccaagatggttagatgcacgtgtatacgctgaccccatggctttgaaggatttcaaggagtttgccagtggaaggaagagtataactctcgacatcctaacagagattgccagtttgccaacttacctttcctctagggccaagctcgcccttgataacatagtcatgctccacacaacagaaagaggagggagggcctatcaacacgccctgaacgaacttccggagtcactggaaacactcatgcttgtagctttactaggtgctatgacagcaggcatcttcctgtttttcatgcaagggaaaggaatagggaaattgtcaatgggtttgataaccattgcggtggctagtggcttgctctgggtagcagaaattcaaccccagtggatagcggcctcaatcatactagagttttttctcatggtactgttgataccggaaccagaaaaacaaaggaccccacaagacaatcaattgatctacgtcatattgaccattctcaccatcattggtctaatagcagccaacgagatggggctgattgaaaaaacaaaaacggattttgggttttaccaggtaaaaacagaaaccaccatcctcgatgtggacttgagaccagcttcagcatggacgctctatgcagtagccaccacaattctgactcccatgctgagacacaccatagaaaacacgtcggccaacctatctctagcagccattgccaaccaggcagccgtcctaatggggcttggaaaaggatggccgctccacagaatggacctcggtgtgccgctgttagcaatgggatgctattctcaagtgaacccaacaaccttgacagcatccttagtcatgcttttagtccattatgcaataataggcccaggattgcaggcaaaagccacaagagaggcccagaaaaggacagctgctgggatcatgaaaaatcccacagtggacgggataacagtaatagatctagaaccaatatcctatgacccaaaatttgaaaagcaattagggcaggtcatgctactagtcttgtgtgctggacaactactcttgatgagaacaacatgggctttctgtgaagtcttgactttggccacaggaccaatcttgaccttgtgggagggcaacccgggaaggttttggaacacgaccatagccgtatccaccgccaacattttcaggggaagttacttggcgggagctggactggctttttcactcataaagaatgcacaaacccctaggaggggaactgggaccacaggagagacactgggagagaagtggaagagacagctaaactcattagacagaaaagagtttgaagagtataaaagaagtggaatactagaagtggacaggactgaagccaagtctgccctgaaagatgggtctaaaatcaagcatgcagtatcaagagggtccagtaagatcagatggattgttgagagagggatggtaaagccaaaagggaaagttgtagatcttggctgtgggagaggaggatggtcttattacatggcgacactcaagaacgtgactgaagtgaaagggtatacaaaaggaggtccaggacatgaagaaccgattcccatggctacttatggttggaatttggtcaaactccattcaggggttgacgtgttctacaaacccacagagcaagtggacaccctgctctgtgatattggggagtcatcttctaatccaacaatagaggaaggaagaacattaagagttttgaagatggtggagccatggctctcttcaaaacctgaattctgcatcaaagtccttaacccctacatgccaacagtcatagaagagctggagaaactgcagagaaaacatggtgggaaccttgtcagatgcccgctgtccaggaactccacccatgagatgtattgggtgtcaggagcgtcgggaaacattgtgagctctgtgaacacaacatcaaagatgttgttgaacaggttcacaacaaggcataggaaacccacttatgagaaggacgtagatcttggggcaggaacgagaagtgtctccactgaaacagaaaaaccagacatgacaatcattgggagaaggcttcagcgattgcaagaagagcacaaagaaacctggcattatgatcaggaaaacccatacagaacctgggcgtatcatggaagctatgaagctccttcgacaggctctgcatcctccatggtgaacggggtggtaaaactgctaacaaaaccctgggatgtgattccaatggtgactcagttagccatgacagatacaaccccttttgggcaacaaagagtgttcaaagagaaggtggataccagaacaccacaaccaaaacccggtacacgaatggttatgaccacgacagccaattggctgtgggccctccttggaaagaagaaaaatcccagactgtgcacaagggaagagttcatctcaaaagttagatcaaacgcagccataggcgcagtctttcaggaagaacagggatggacatcagccagtgaagctgtgaatgacagccggttttgggaactggttgacaaagaaagggccctacaccaggaagggaaatgtgaatcgtgtgtctataacatgatgggaaaacgtgagaaaaagttaggagagtttggcagagccaagggaagccgagcaatctggtacatgtggctgggagcgcggtttctggaatttgaagccctgggttttttgaatgaagatcactggtttggcagagaaaattcatggagtggagtggaaggggaaggtctgcacagattgggatatatcctggaggagatagacaagaaggatggagacctaatgtatgctgatgacacagcaggctgggacacaagaatcactgaggatgaccttcaaaatgaggaactgatcacggaacagatggctccccaccacaagatcctagccaaagccattttcaaactaacctatcaaaacaaagtggtgaaagtcctcagacccacaccgcggggagcggtgatggatatcatatccaggaaagaccaaagaggtagtggacaagttggaacatatggtttgaacacattcaccaacatggaagttcaactcatccgccaaatggaagctgaaggagtcatcacacaagatgacatgcagaacccaaaagggttgaaagaaagagttgagaaatggctgaaagagtgtggtgtcgacaggttaaagaggatggcaatcagtggagacgattgcgtggtgaagcccctagatgagaggtttggcacttccctcctcttcttgaacgacatgggaaaggtgaggaaagacattccgcagtgggaaccatctaagggatggaaaaactggcaagaggttcctttttgctcccaccactttcacaagatctttatgaaggatggccgctcactagttgttccatgtagaaaccaggatgaactgatagggagagccagaatctcgcagggagctggatggagcttaagagaaacagcctgcctgggcaaagcttacgcccagatgtggtcgcttatgtacttccacagaagggatctgcgtttagcctccatggccatatgctcagcagttccaacggaatggtttccaacaagcagaacaacatggtcaatccacgctcatcaccagtggatgaccactgaagatatgctcaaagtgtggaacagagtgtggatagaagacaaccctaatatgactgacaagactccagtccattcgtgggaagatataccttacctagggaaaagagaggatttgtggtgtggatccctgattggactttcttccagagccacctgggcgaagaacattcatacggccataacccaggtcaggaacctgatcggaaaagaggaatacgtggattacatgccagtaatgaaaagatacagtgctccttcagagagtgaaggagttctgtaattaccaacaacaaacaccaaaggctattgaagtcaggccacttgtgccacggtttgagcaaaccgtgctgcctgtagctccgccaataatgggaggcgtaataatccccagggaggccatgcgccacggaagctgtacgcgtggcatattggactagcggttagaggagacccctcccatcactgataaaacgcagcaaaagggggcccgaagccaggaggaagctgtactcctggtggaaggactagaggttagaggagacccccccaacacaaaaacagcatattgacgctgggaaagaccagagatcctgctgtctctgcaacatcaatccaggcacagagcgccgcaagatggattggtgttgttgatccaacaggttct

SEQ ID NO: 244 - RNA, 2049 nt, synthetic construct
  misc_feature 1..2049: note = Synthetic Polynucleotide
  source 1..2049: mol_type = other RNA
atggatgctatgaaaagaggcctgtgttgtgtgttgctgttgtgcggagctgtgtttgtgtcacctttccacctgactacccgcaatggtgagccccatatgattgtgtcgcgccaggagaaggggaagtccctcctgttcaaaactgaaaacggcgtgaacatgtgtaccctgatggccatggaccttggagaactgtgcgaggacaccatcacctacaattgtccgctcctgcgccaaaacgaaccagaagatatcgactgctggtgcaattccacttcaacctgggttacctacggaacttgcaccgccacgggagaacacagaagagaaaagcgctcggtggcgctggtgcctcatgtcggaatgggactggagactcggacggagacttggatgtcctcggagggagcatggaaacatgcccaacggatcgaaacttgggtgctgaggcaccctggattcaccatcatggcagcgatcctcgcctacactataggtactacctactttcaaagggtgctgatcttcattctcctcaccgcagtggccccttcaatgaccatgaggtgcattgggatctcgaaccgggacttcgtcgaaggagtgtccggaggtagctgggtcgacatcgtcctggaacacggaagctgcgtgactactatggcgaagaacaagccaaccttggacttcgagcttatcaagaccgaggcgaagcacccggccactctgagaaagtactgcatcgaggctaagctcaccaacacgaccactgcctcgcgatgcccaactcagggagaaccgtcactgaacgaagaacaggataaacgctttgtgtgcaagcatagcatggtggatagaggctggggaaacggctgtggactcttcggaaagggtggaattgtgacgtgcgcaatgttcacttgcaagaagaatatggaagggaagatcgtccagccggagaacctggaatacactatcgtgatcaccccgcactcaggcgaggagaacgcagtgggcaacgataccgggaagcacgggaaggaaatcaaggtgaccccgcagtcgtccattaccgaggccgaactcaccggatacggcactgtgactatggaatgctcgccacggaccgggctggatttcaatgagatggtgctcttgcaaatggagaacaaagcctggctggtccaccgccagtggttcctcgacctcccccttccgtggctgccgggagctgacacccaaggatccaactggatccaaaaagaaacccttgtcacgtttaagaatccacatgccaaaaagcaggacgtggtcgtgctcggaagccaggaaggagccatgcacactgcgctgactggagcaaccgaaattcaaatgtcgagcggcaacctcctcttcactggacatctgaagtgccggctgcgcatggacaaactgcaacttaagggcatgtcatactcgatgtgtaccggcaaattcaaggtggtgaaggagatcgcggagactcagcacgggaccatcgtcatccgggtccagtatgagggtgatggttccccctgcaagatccctttcgaaatcatggatctggagaaacgtcacgtgctgggccggctgatcactgtgaatccgatcgttacggagaaagacagcccggtgaacatcgaagctgaaccgccgtttggggatagctacattatcatcggcgtggaaccaggccagctcaagttgtcgtggttcaagaaaggatccagcatcggacagatgttcgaaaccactatgcgcggagccaaacgcatggctatcctgggggacacggcctgggacttcgggtcgctgggtggtgtgttcacctccattggaaaggcgctccatcaggtgtttggtgcgatctacggcgccgcattctccggagtgtcatggaccatgaagatcctcatcggagtcgtcatcacctggatcggcatgaattctcggtccacttccttgagcgtcagcctggtgctggtcggagttgtgactctgtaccttggagtgatggtccaggcc

SEQ ID NO: 245 - RNA, 1749 nt, synthetic construct
  misc_feature 1..1749: note = Synthetic Polynucleotide
  source 1..1749: mol_type = other RNA
atggatgctatgaaaagaggcctgtgttgtgtgttgctgttgtgcggagctgtgtttgtgtcacctttccacctgactacccgcaatggtgagccccatatgattgtgtcgcgccaggagaaggggaagtccctcctgttcaaaactgaaaacggcgtgaacatgtgtaccctgatggccatggaccttggagaactgtgcgaggacaccatcacctacaattgtccgctcctgcgccaaaacgaaccagaagatatcgactgctggtgcaattccacttcaacctgggttacctacggaacttgcaccgccacgggagaacacagaagagaaaagcgctcggtggcgctggtgcctcatgtcggaatgggactggagactcggacggagacttggatgtcctcggagggagcatggaaacatgcccaacggatcgaaacttgggtgctgaggcaccctggattcaccatcatggcagcgatcctcgcctacactataggtactacctactttcaaagggtgctgatcttcattctcctcaccgcagtggccccttcaatgaccatgaggtgcattgggatctcgaaccgggacttcgtcgaaggagtgtccggaggtagctgggtcgacatcgtcctggaacacggaagctgcgtgactactatggcgaagaacaagccaaccttggacttcgagcttatcaagaccgaggcgaagcacccggccactctgagaaagtactgcatcgaggctaagctcaccaacacgaccactgcctcgcgatgcccaactcagggagaaccgtcactgaacgaagaacaggataaacgctttgtgtgcaagcatagcatggtggatagaggctggggaaacggctgtggactcttcggaaagggtggaattgtgacgtgcgcaatgttcacttgcaagaagaatatggaagggaagatcgtccagccggagaacctggaatacactatcgtgatcaccccgcactcaggcgaggagaacgcagtgggcaacgataccgggaagcacgggaaggaaatcaaggtgaccccgcagtcgtccattaccgaggccgaactcaccggatacggcactgtgactatggaatgctcgccacggaccgggctggatttcaatgagatggtgctcttgcaaatggagaacaaagcctggctggtccaccgccagtggttcctcgacctcccccttccgtggctgccgggagctgacacccaaggatccaactggatccaaaaagaaacccttgtcacgtttaagaatccacatgccaaaaagcaggacgtggtcgtgctcggaagccaggaaggagccatgcacactgcgctgactggagcaaccgaaattcaaatgtcgagcggcaacctcctcttcactggacatctgaagtgccggctgcgcatggacaaactgcaacttaagggcatgtcatactcgatgtgtaccggcaaattcaaggtggtgaaggagatcgcggagactcagcacgggaccatcgtcatccgggtccagtatgagggtgatggttccccctgcaagatccctttcgaaatcatggatctggagaaacgtcacgtgctgggccggctgatcactgtgaatccgatcgttacggagaaagacagcccggtgaacatcgaagctgaaccgccgtttggggatagctacattatcatcggcgtggaaccaggccagctcaagttgtcgtggttcaagaaagga

SEQ ID NO: 246 - RNA, 2544 nt, synthetic construct
  misc_feature 1..2544: note = Synthetic Polynucleotide
  source 1..2544: mol_type = other RNA
atggatgctatgaaaagaggcctgtgttgtgtgttgctgttgtgcggagctgtgtttgtgtcacctttccacctgactacccgcaatggtgagccccatatgattgtgtcgcgccaggagaaggggaagtccctcctgttcaaaactgaaaacggcgtgaacatgtgtaccctgatggccatggaccttggagaactgtgcgaggacaccatcacctacaattgtccgctcctgcgccaaaacgaaccagaagatatcgactgctggtgcaattccacttcaacctgggttacctacggaacttgcaccgccacgggagaacacagaagagaaaagcgctcggtggcgctggtgcctcatgtcggaatgggactggagactcggacggagacttggatgtcctcggagggagcatggaaacatgcccaacggatcgaaacttgggtgctgaggcaccctggattcaccatcatggcagcgatcctcgcctacactataggtactacctactttcaaagggtgctgatcttcattctcctcaccgcagtggccccttcaatgaccatgaggtgcattgggatctcgaaccgggacttcgtcgaaggagtgtccggaggtagctgggtcgacatcgtcctggaacacggaagctgcgtgactactatggcgaagaacaagccaaccttggacttcgagcttatcaagaccgaggcgaagcacccggccactctgagaaagtactgcatcgaggctaagctcaccaacacgaccactgcctcgcgatgcccaactcagggagaaccgtcactgaacgaagaacaggataaacgctttgtgtgcaagcatagcatggtggatagaggctggggaaacggctgtggactcttcggaaagggtggaattgtgacgtgcgcaatgttcacttgcaagaagaatatggaagggaagatcgtccagccggagaacctggaatacactatcgtgatcaccccgcactcaggcgaggagaacgcagtgggcaacgataccgggaagcacgggaaggaaatcaaggtgaccccgcagtcgtccattaccgaggccgaactcaccggatacggcactgtgactatggaatgctcgccacggaccgggctggatttcaatgagatggtgctcttgcaaatggagaacaaagcctggctggtccaccgccagtggttcctcgacctcccccttccgtggctgccgggagctgacacccaaggatccaactggatccaaaaagaaacccttgtcacgtttaagaatccacatgccaaaaagcaggacgtggtcgtgctcggaagccaggaaggagccatgcacactgcgctgactggagcaaccgaaattcaaatgtcgagcggcaacctcctcttcactggacatctgaagtgccggctgcgcatggacaaactgcaacttaagggcatgtcatactcgatgtgtaccggcaaattcaaggtggtgaaggagatcgcggagactcagcacgggaccatcgtcatccgggtccagtatgagggtgatggttccccctgcaagatccctttcgaaatcatggatctggagaaacgtcacgtgctgggccggctgatcactgtgaatccgatcgttacggagaaagacagcccggtgaacatcgaagctgaaccgccgtttggggatagctacattatcatcggcgtggaaccaggccagctcaagttgtcgtggttcaagaaaggaggaggtggaggatccggaggcggagggtcgggcggtggtggatcggaggtcaaactgcagcaatcagggaccgaagtcgtgaagccgggggcttcagtcaagctgtcctgcaaggccagcggctatatcttcactagctacgacatcgattgggtgcggcagactccggagcaaggactcgagtggattgggtggatctttccgggcgagggatcaaccgagtacaacgaaaaatttaagggacgggcaacgctgtccgtggacaagagctcatctacggcgtacatggagctgacgcggctcacgtcagaggattccgccgtctacttctgtgccaggggcgactactaccggcgctactttgatctgtggggacaaggaacgaccgtgactgtctcatcaggcggcggcggatcgggaggaggcggatcgggtggcggtggttcggacattcagatgactcaatcgcccagcttcctgtcgacctcactggggaattctattacgatcacttgtcacgcttcgcagaacatcaagggttggctggcttggtaccagcagaaaagcggtaacgccccgcaactgctcatctacaaggcatcgtccctgcaatcgggagtgccgtcacgcttttcaggatcgggctccggaaccgattacatctttaccatcagcaacctgcagccggaagacatcgccacttactactgtcaacactatcagagctttccgtggacctttggaggggggaccaaattggagatcaagcgcgactacaaggatgacgatgacaaa

SEQ ID NO: 247 - RNA, 916 nt, synthetic construct
  misc_feature 1..916: note = Synthetic Polynucleotide
  source 1..916: mol_type = other RNA
atggattggacctggatcttgtttctcgtcgccgcagccactcgcgttcatagcaaaggaatgtcatactccatgtgcacgggaaaattcaaggtggtcaaagagatcgcggagactcagcacggcaccatcgtcattcgcgtgcaaactgaaggagatggatctccctgcaagatcccgttcgagatcatggacctggaaaagagacacgtcctcggtagactgatcaccgtgaacccgatcgtgacggagaaggattccccggtgaatattgaagcagagcctccatttggggactcatacattatcattggggtcgagccgggccagctgaagctgaattggtttaagaagggctcgtcaatcggacagatgttcgaaactactatgaggggtgcaaagcggatggcgatcctctcgggcggagatatcatcaaactccttaacgaacaggtgaacaaggagatgcagtcctcaaacctttacatgagcatgtcgtcctggtgttacacccatagcctggacggcgctggattgttcctgtttgaccatgcagcggaggaatacgaacacgccaagaagctcatcatcttcctgaacgagaataacgtgccagtgcaactgacctccatctcggctcctgagcacaagttcgaaggactcacccagatcttccaaaaggcctacgaacacgaacagcacatcagcgaatccatcaacaatatcgtggaccatgctatcaaaagcaaagaccatgcgaccttcaacttcctgcaatggtatgtcgccgaacagcacgaagaggaggtgctgttcaaggacattctcgacaaaatcgaattgatagggaacgaaaatcacggtctgtacctggccgatcaatacgtgaagggaattgccaagtcgcggaagtcgt

SEQ ID NO: 248 - RNA, 2058 nt, unidentified
  source 1..2058: mol_type = genomic RNA; note = Dengue Virus
atgctgaatattctgaaccgccgccgccggactgccgggattataattatgatgattcccaccgtgatggccttccacctgaccacccggaacggggaaccacatatgatcgtgtccagacaggagaagggaaagtccctgctgttcaagaccgaggacggcgtgaacatgtgcaccctcatggctatggacctgggcgaactctgcgaggacaccatcacctacaagtgccccctgttgaggcagaacgagccggaggatattgactgctggtgcaattcgaccagcacctgggtcacctacgggacttgcaccacaaccggagaacatcggcgcgaaaagcgcagcgtggctttggtgcctcacgtcggaatggggctggagactagaaccgagacttggatgtcgtcggaaggggcctggaaacacgcacagcgcatcgaaacttggatactcaggcatcccggcttcaccattatggccgcgatcctggcatacaccatcggtactacccacttccaacgggccctgatctttatcctcctgaccgctgtcgcaccatccatgaccatgcggtgtatcggtatcagcaacagggacttcgtggagggagtgtcgggaggatcctgggtggatattgtgctggaacacggttcctgcgtcactaccatggcgaagaacaagcctaccctggactttgagctgatcaaaactgaggccaagcagccggccaccctgcgcaagtactgcatcgaagccaagctgaccaataccactaccgaatcccgctgtccgacccaaggggagccctccctgaatgaggagcaggacaagcgcttcgtctgcaagcattcaatggtcgaccgcggctggggaaacggctgcggactgttcggaaagggcggcattgtgacctgtgccatgttcacttgcaagaagaacatggaaggaaagatcgtgcagcccgaaaacctggagtataccatcgtcgtgaccccgcactccggggaagaacacgctgtgggaaacgacaccggaaagcacggaaaggagatcaaagtgaccccacagtcgagcattaccgaggccgaacttactggttacggcactgtgacgatggaatgttcaccgagaactggactggatttcaacgaaatggtgctgctccaaatggaaaacaaggcctggctggtgcaccgccagtggtttcttgacctccctctcccttggctgcctggagcagacactcagggttccaactggattcagaaggaaacactcgtgaccttcaagaaccctcacgcgaagaagcaggatgtggtcgtgctgggaagccaggagggagcgatgcataccgccctcaccggcgcgacggagattcagatgtccagcggaaaccttctgttcaccggacacctgaagtgcagactgaggatggacaagctgcagctcaagggaatgtcctactccatgtgcactggaaagttcaaggtcgtgaaggagattgccgaaactcagcatggtaccatcgtgatccgggtgcaatatgaaggggacggatccccgtgcaagatccctttcgaaatcatggacttggagaagcgacacgtgctgggcagactgatcacagtcaaccccatcgtgactgagaaggattcacccgtgaacattgaagccgagccgcctttcggcgatagctacatcatcattggcgtggaaccgggacagcttaagctcaactggttcaagaagggttcctcgatcggtcaaatgtttgaaaccacgatgcggggtgccaaacggatggccattctgggagacaccgcctgggatttcggctccttgggcggagtgttcacttctatcggaaaggcgctgcaccaagtgttcggagccatctacggcgccgcgttctcgggcgtcagctggaccatgaagattctgatcggggtcatcatcacttggattgggatgaactcacggtccacctccctgagcgtgtcccttgtcctggtcggcatcgtgaccctgtacctcggagtgatggtgcaggcttag

SEQ ID NO: 249 - RNA, 2058 nt, unidentified
  source 1..2058: mol_type = genomic RNA; note = Dengue Virus
atgcttaacattctcaaccgccgccggagaactgctggtattatcattatgatgattcccactgtgatggccttccacctgaccacgcggaacggcgaaccccatatgattgtcggtcggcaggaaaaggggaagtccctgctgttcaaaactgaggacggagtgaacatgtgcaccctcatggctattgacctgggagagctgtgcgaagatactatcacgtacaagtgccccctgctgcgccagaacgagcctgaggacattgactgctggtgcaactccacgtcaacctgggtcacctacggaacttgcgcgactaccggcgaacatcgcagagaaaagagaagcgtggccctcgtgccgcacgtcgggatggggctggaaacccggaccgaaacctggatgtcctcggaaggcgcctggaagcacgtgcagaggatcgaaacttggatcctccggcacccgggattcaccatcatggccgccatcctcgcttacacaatcggaaccactcactttcaacgcgccctgatcttcatcctgcttaccgccgtggccccgtccatgaccatgcgctgcattggaatgtcaaaccgggacttcgtcgagggagtctccggaggaagctgggtggacatcgtgctggagcacggcagctgtgtgaccaccatggccaagaacaagccaactcttgatttcgaactgatcaagaccgaggccaagcagcctgccactctgaggaagtactgtatcgaagcgaagctgaccaacaccactaccgaatcccgctgcccgacccagggcgaaccttccttgaacgaagaacaggacaagagattcgtgtgcaagcatagcatggtcgacaggggatgggggaacggatgtggactctttgggaagggcggaatcgtcacctgtgcgatgttccggtgcaagaagaacatggaggggaaggtcgtgcagcccgaaaatctcgagtacactatcgtgatcaccccgcattccggagaggagcacgccgtgggcaacgacaccgggaagcacggaaaggagatcaaaattacccctcaatcctccaccaccgaagccgaattgactggttacggtaccgtgactatggagtgctcgccgcggactggcttggacttcaacgagatggtgctgctgcaaatggagaacaaggcctggctggtgcaccggcagtggtttcttgatctgcctctgccttggctgcccggagccgacacccagggtagcaattggatccagaaagagacactcgtgacctttaagaacccgcacgcaaagaagcaggatgtcgtggtcctgggaagccaagaaggggcaatgcataccgcactcactggagccactgaaatccagatgtcctccggcaatctgctgttcaccggccatctgaagtgccgactgcgcatggacaagctccagcttaagggaatgtcctactccatgtgtactggaaagttcaaagtcgtgaaggaaattgccgaaacccagcacggcaccatagtgatccgggtgcagtacgagggcgacggctcaccctgcaaaatcccgttcgagattatggatctcgaaaagcgccacgtgctgggcagactgattaccgtgaaccctatcgtgaccgagaaggattccccagtgaacatcgaggccgaaccgcccttcggagactcgtatatcatcatcggcgtggagcccggccagctgaagctgaactggttcaagaaggggtcgagcatcggccagatgttcgagactaccatgcgcggcgcgaagaggatggcgatcctgggggataccgcttgggacttcggttccctcggcggggtgttcacctcgattgggaaggccctccaccaagtgttcggtgcaatctacggagcggcgttcagcggagtgtcgtggaccatgaagattctgatcggcgtgatcatcacctggattggcatgaactcccggtctactagcctgtcggtgaccctggtgctggtcggaatcgtgaccttgtacctgggagtgatggtgcaagcttag

SEQ ID NO: 250 - RNA, 2058 nt, unidentified
  source 1..2058: mol_type = genomic RNA; note = Dengue Virus
atgctgaacatcctgaaccgcagaaggagaaccgccggtattattattatgatgatccccaccgtgatggcattccacctgactacccgcaacggagagccgcatatgatcgtgggccgccaggaaaagggaaagtccctgctgttcaagactgaggacggcgtgaacatgtgcactctcatggccatcgacctcggcgaactgtgcgaggacaccattacttacaagtgcccgctgctgagacagaacgagcctgaggacatcgactgttggtgtaactcgacctccacctgggtcacctacggaacgtgcgccacaaccggagaacaccgccgggaaaagcggagcgtggctctggtgccgcacgtcggaatgggtctggagactagaaccgaaacctggatgtcatccgagggggcatggaaacatgtgcagcgaatcgagacttggatcctgagacacccgggcttcactatcatggcggccatccttgcctacaccattggcactactcacttccaacgggcgctgatcttcatactgctcaccgcggtggccccctccatgacgatgcgctgcatcggaatctccaaccgggacttcgtggagggcgtcagcggaggcagctgggtggacatcgtgttggagcacggaagctgcgtgaccaccatggccaagaacaagcccactcttgattttgagctgatcaagacggaagcaaagcagccggccactctgaggaagtactgcatcgaggccaagctcaccaacacaaccaccgaatctcggtgcccgacccaaggagagccatcactgaacgaggaacaggacaagagattcctgtgcaaacattcgatggtggacaggggatggggaaatggttgcggcctgttcggcaaaggaggcattgtgacctgtgcgatgttcacttgcaagaaaaacatggaggggaaggtcgtgttgccggagaacctggagtacactatcgtgattaccccgcactccggggaggaacatgccgtgggaaatgacaccggaaagcacgggaaggaaatcaaaatcacgcctcagtcctcaatcaccgaagccgagcttaccggctacggtaccgtgaccatggagtgcagccctcggactggactggacttcaacgagatggtgctgctgcaaatggaagataaggcctggctggtgcaccggcagtggttcttggatttgccactgccttggctgcccggcgcggatacccagggttccaactggattcagaaggaaaccctcgtgaccttcaagaatcctcacgccaagaagcaggacgtggtggtgctgggttcccaagaaggggccatgcatactgccctcactggagcgaccgaaatccagatgtcgtccggcaacctcctgttcaccggccacctgaagtgccgcctgcggatggacaagttgcagctgaagggaatgagctactcgatgtgtaccggaaagttcaagatcgtgaaggaaatcgccgaaacccagcacggaaccatcgtcattagagtgcagtacgaaggggacggcagcccgtgcaagatccccttcgaaattatggacctggagaagcgccacgtgctcggaaggctcatcactgtcaacccaatcgtcaccgaaaaggactcccctgtgaacatcgaagcagagccccctttcggggactcctacattattatcggcgtggagcccggccagctgaagctgaactggttcaagaagggatcctcgatcggacagatgttcgaaaccaccatgcggggagccaagcggatggctattctgggagataccgcttgggatttcggctccctcggcggcgtctttacttccatcgggaaagcgctccaccaagtgtttggagccatctacggtgccgctttttccggggtgtcatggaccatgaagattcttatcggggtcattattacttggatcggcatgaactcccggagcacctcgctgtccgtgagcctcgtgctcgtgggggtggtcactctgtatcttggtgccatggtgcaggcctag

SEQ ID NO: 251 - RNA, 2058 nt, unidentified
  source 1..2058: mol_type = genomic RNA; note = Dengue Virus
atgcttaacatcctgaatagaagaagaagaaccgccggcattatcattatgatgatacccaccgtgatggccttccacctgactactcgcaacggagagcctcatatgatcgtgtcgcggcaggagaagggaaagtccctgctgtttaagacggaggacggcgtgaacatgtgcactcttatggcaatggaccttggagagctgtgcgaggataccatcacctacaagtgtccgttcctgaagcaaaacgagcctgaggatattgactgctggtgcaactccacctcaacctgggtcacatatgggacctgtaccactactggcgaacaccgccgcgagaaaagaagcgtggcgttggtgcctcacgtcggcatgggtctggaaactcggaccgaaacttggatgagctcagagggggcatggaagcacgcccagaggattgaaacctggattctgcgccaccctggattcaccatcatggcggctattctggcgtacactattggaaccacccactttcagcgggcccttatcttcatcctcctcactgccgtggcgccctccatgactatgcggtgtatcggaatttccaaccgcgacttcgtggaaggagtgtccggaggctcctgggtcgacattgtgctggaacatggttcatgcgtgaccacgatggccaagaacaagcccaccctcgacttcgagctgatcgagactgaagccaagcagccggccactctgcggaagtactgtatcgaggccaagctcaccaacaccaccaccgattcccgctgcccgacccaaggagaaccttcgctcaacgaggagcaggacaagcggttcgtgtgcaagcacagcatggtcgacaggggatgggggaatggatgcggtctgttcggaaagggaggcattgtgacttgtgcaatgttcacttgcaagaagaacatgaaggggaaggtcgtgcagccggaaaacctggagtacaccatcgtgatcacccctcattcgggcgaagaacacgctgtggggaatgataccggaaagcacggaaaggaaattaagatcacaccccaatccagcatcactgaggcagaactgaccggctacggcactgtgaccatggagtgctcgcctcggactggcctggacttcaacgagatggtgctgctccaaatggaaaacaaggcctggctggtgcacagacagtggttcctcgatttgcccttgccgtggctccctggcgccgacacccagggatctaactggatccagaaggaaacccttgtgaccttcaagaacccgcacgctaagaaacaggatgtggtggtgctgggaagccaggaaggagcaatgcataccgcgctcacgggtgccaccgagatccagatgagctccgggaacctcctgttcaccggtcacctgaagtgccgactccgcatggacaaactgcagctcaaggggatgtcctactccatgtgcaccgggaaattcaaggtcgtgaaggagatcgctgagactcagcacggtactatcgtgatccgggtgcagtatgagggagatgggagcccgtgcaaaatcccatttgagatcatggacttggaaaagcgccatgtgctgggtcggctgattaccgtgaacccaatcgtcaccgaaaaggacagccccgtcaacattgaagccgaaccacccttcggagactcgtacatcatcattggcgtggaaccgggccagctgaagctgaactggttcaaaaaggggtcctctatcggccaaatgatcgaaaccaccatgcggggagctaagcggatggcgattttgggagacactgcgtgggactttggctcactggggggagtgttcaccagcatcggcaaagccctgcaccaagtgttcggtgccatctacggagccgccttcagcggagtgtcctggatcatgaagatcctgatcggcgtgatcattacctggatcggcatgaactccaggtccacctcgctctccgtgtcgctggtgctggtcggggtcgtgaccctgtacctgggagtgatggtccaggcctga

SEQ ID NO: 252 - RNA, 2058 nt, unidentified
  source 1..2058: mol_type = genomic RNA; note = Dengue Virus
atgttgaatatcctgaaccgccgccggagaactgccggaattatcattatgatgatccctaccgtgatggcgttccaccttactacccggaacggggagcctcacatgatcgtgtcacgccaggagaaggggaaatccctgctgttcaagaccaaggacggtaccaacatgtgtaccctgatggcgatggacctcggagagctgtgcgaggacaccatcacctacaaatgcccgttcctgaagcagaacgagccggaagatattgactgttggtgcaactccacctccacttgggtcacctacggaacttgcaccactactggggagcatagacgggagaagcgctccgtggccctggtgccgcacgtcggcatgggactggaaaccagaaccgagacttggatgtccagcgaaggcgcctggaagcacgcccagcggattgaaacttggatcctgaggcacccgggttttaccattatggccgctatcttggcatacaccatcggcaccacccacttccaacgcgtcctgatcttcatcctgctgaccgccattgcgccctccatgaccatgcggtgcatcggaatcagcaaccgcgacttcgtggaaggcgtcagcggcggttcttgggtggacatcgtgttggagcacggatcgtgcgtgaccaccatggccaagaacaagccgaccctcgatttcgagctgatcaagactgaagccaagcagccagctaccctgcggaagtattgcatcgaagccaagctcactaatactacgaccgacagccggtgtccgacccaaggagagcccaccctgaatgaggaacaagacaagcgcttcgtgtgcaagcattccatggtggaccggggctggggaaacggctgcggactgttcgggaaaggaggaattgtgacttgcgccatgttcacttgcaagaagaacatggaggggaagatcgtccagcctgagaacctcgagtacacggtcgtgattactccgcactcgggagaagaacacgccgtgggcaacgacaccggaaagcatgggaaggaagtgaaaatcacgccccaatcgtcgattaccgaggctgagctgaccggctacggcaccgtgaccatggagtgctccccgaggaccggactggacttcaacgaaatggtgctgctgcagatgaaggacaaggcctggctggtgcaccgccagtggttcctcgacctcccactcccctggctgcccggagcggatacgcagggatccaactggatccagaaggaaactcttgtgaccttcaagaaccctcatgccaagaagcaggacgtggtggtcctgggatcccaagagggcgcgatgcacaccgcactgaccggcgccaccgaaattcagatgtcctccggaaacctcctgttcactggccacctgaagtgcagactccgcatggacaagctgcagctcaaggggatgagctactccatgtgtaccggaaaattcaaggtcgtgaaggaaattgcagaaacacagcatgggacaattgtcattcgggtccagtacgagggcgatggttcaccgtgcaagactccattcgagatcatggatctggagaaaagacacgtgctgggtcggctgactaccgtgaacccaatcgtgactgagaaggactcccccgtgaacatcgaagccgagcctccttttggcgattcctacatcatcattggagtggaacccggacagcttaagttggattggttcaagaagggctcctcgatcggacagatgttcgaaaccaccatgcgcggtgccaagcgaatggccatcctgggggacaccgcctgggacttcggtagcctgggcggagtgtttacctcaattggaaaggctctgcaccaagtgtttggggcgatctacggagcggccttcagcggtgtctcctggactatgaagattctcatcggagtgataatcacctggatcggcatgaacagccggtcaaccagcctgtccgtgtccctggtgctggtcggcatcgtgactctctacctcggagtgatggtgcaggcctag

SEQ ID NO: 253 - RNA, 2058 nt, unidentified
  source 1..2058: mol_type = genomic RNA; note = Dengue Virus
atgctcaacatactgaacagacggagaaggaccgccggtattattatcatgatgatccctactgtgatggcattccacctgacaacccgcaacggagagccccacatgatcgtgtcacgccaggagaaagggaagtcactgctgttcaagaccgaagtcggcgtgaacatgtgtaccctgatggcgatggatcttggcgaactgtgcgaggacaccatcacgtacaagtgccccctgttgcggcaaaacgaaccagaggacatcgactgctggtgtaactccacctcgacctgggtcacctacggaacctgtaccactatgggggaacaccggcgggagaagcgctccgtggcgctcgtgcctcatgtcggcatgggactggagactcggactgaaacctggatgtcgtcggagggggcctggaagcacgtccagcggatcgagacttggatccttcgccatccgggcttcaccatgatggccgccatcctggcctacaccatcggaaccacccatttccaacgggccctgatcctgatcctgttgactgccgtgaccccctccatgactatgcggtgcattgggatgtcgaacagggatttcgtggagggagtcagcggtggcagctgggtggacatcgtgctggaacatggatcctgcgtgactaccatggcaaagaacaagccaaccctcgatttcgaactgatcaagaccgaggcgaaacagccggcgaccctgaggaagtactgcatcgaggccaagctcaccaacaccactaccgagagcagatgccctacccaaggggaaccttccctgaacgaggagcaggacaagagattcgtctgcaagcactccatggtggaccgcggctggggaaacggatgcggactcttcggaaagggcggtattgtgacctgtgccatgttccgctgcaagaaaaacatggaagggaaagtggtgcagcccgagaacctcgagtacactatcgtgatcacaccgcacagcggagaagaacacgccgtgggcaacgacactggaaagcacgggaaggaaatcaagatcaccccgcaatcctcaatcactgaggctgagttgaccggctacgggactattaccatggaatgctccccacgaacgggactggacttcaacgaaattgtgttgctccaaatggaaaacaaggcctggctcgtgcaccggcagtggttcctggatctgcccctgccgtggctgccgggtgccgacactcaggggagcaactggattcagaaggaaacccttgtgaccttcaagaacccccacgcaaagaagcaggacgtggtggtgctgggtagccaagaaggcgccatgcacacggccctgaccggagcgaccgagatccagatgtccagcggaaatctgctctttactggtcatctgaagtgcagacttcggatggacaagctgcaactgaagggaatgtcctactcaatgtgcactggaaagttcaaggtcgtgaaggagatcgccgaaacccagcacgggactatcgtcatccgcgtgcagtacgaaggagatggctccccgtgcaagatccctttcgaaatcatggacctggagaagcgccacgtgttggggcgccttattactgtgaaccccatcgtgaccgagaaggactcccctgtcaacatcgaggctgaaccgccattcggagattcctatatcattatcggagtggaaccgggccagctcaagctgaattggttcaagaagggatcctcgattggccagatgttcgaaacgactatgcggggcgctaagcgcatggccatcctgggcgatactgcctgggattttggttctctgggcggagtgttcacctccattggaaaggccctgcaccaagtgttcggcgccatctacggtgccgcgtttagcggtgtctcatggaccatgaaaatcctcattggcgtgatcattacctggattggcatgaactccagaagcacttccctgtccgtgaccctggtgctcgtcggaattgtgacactctacctcggagtgatggtgcaggcttga

SEQ ID NO: 254 - RNA, 2058 nt, unidentified
  source 1..2058: mol_type = genomic RNA; note = Dengue Virus
atgctgaacattttgaacagacgccgaaggaccgcaggcattatcattatgatgatccctaccgtgatggccttccatctgactactaggaacggagagccacatatgatcgtgtcgcgccaggaaaagggaaagagcctgctttttaaaaccaaggacggcacgaacatgtgcacccttatggccatggacctgggggagttgtgcgaggacaccatcacctacaagtgcccgttcctgaagcaaaacgagcccgaagatattgactgctggtgcaactccacctccacctgggtcacttatgggacttgcaccaccaccggcgaacatcgcagagaaaagagaagcgtggccctggtcccccacgtcgggatgggcctcgagactcggaccgaaacttggatgtcatcagagggcgcatggaagcatgctcagcggatcgaaacctggatcctgagacaccctggtttcacaattatggccgccattcttgcgtacacgatcggaacgactcatttccaacgcgtgctgatcttcattctcctgaccgctattgcgccgtccatgactatgcggtgcatcggaatctcaaaccgggacttcgtggaaggagtgtcgggaggatcctgggtggacattgtgctggagcacggttcctgcgtcaccaccatggccaaaaacaagcctaccctggacttcgagctgatcaagactgaggccaagcagcccgcgaccctccggaagtactgcatcgaggccaagttgaccaacactactaccgattcccggtgcccgacccaaggagaaccaactctgaacgaagaacaggataagcggtttgtgtgcaagcactcaatggtggacaggggatggggcaacggctgtggactgttcggaaagggtggtattgtgacctgtgcaatgtttacctgtaaaaagaatatggaggggaagatcgtgcagcctgaaaatctcgagtacactgtcgtcatcaccccgcactcgggagaggagcacgctgtgggcaacgacaccggaaagcacggaaaggaggtcaagataaccccgcaatcctccattacggaagccgaactgactggttacggcaccgtgactatggagtgctcccctcggaccggcctggacttcaacgaaatggtgctgctccaaatggaagataaggcctggctggtgcacaggcagtggttcctggatctcccgctgccgtggctgcctggcgctgacactcagggaagcaactggatccagaaggaaaccctcgtgacctttaagaacccccacgccaagaagcaggatgtggtggtgttgggaagccaggagggggccatgcatactgccctcaccggcgcgaccgaaatccagatgtcgtccggcaatctgctgttcaccggacacctcaagtgtcgccttcggatggacaagctgcagctgaagggaatgagctacagcatgtgcaccgggaagttcaagatcgtgaaggaaatcgccgaaacccagcacggaaccatcgtgatccgggtgcagtacgagggcgacggttctccctgcaaaatccccttcgaaatcatggatctggagaagagacacgtcctgggtcgcctgatcaccgtgaaccccattgtgactgagaaggactccccagtgaacatcgaagcggagcccccattcggagacagctacattatcattggtgccgaaccggggcagctgaaactggactggttcaagaagggcagctcgattggccaaatgttcgaaacgacaatgcggggcgcaaagcgcatggccatcctgggagacactgcctgggacttcgggtcccttgggggggtgttcacctcgatcggaaaagccttgcaccaagtgttcggcgcaatctacggcgccgcgttctcgggagtctcctggactatgaagatcctgatcggtgtcatcatcacctggatcgggatgaactcccggtccacttccctctcggtgtcactcgtgcttgtgggaattgtcaccctgtacctcggagtgatggtgcaggcctga

SEQ ID NO: 255 - RNA, 2058 nt, unidentified
  source 1..2058: mol_type = genomic RNA; note = Dengue Virus
atgctgaatattctgaaccgacgccgccgcactgccggaatcattatcatgatgatccctaccgtgatggcgttccatctcaccactcggaatggcgaaccccatatgatcgtgtcgagacaggaaaagggaaagagccttttgttcaaaactgaagatggagtgaacatgtgcactctcatggcaatggatctgggcgaactgtgcgaagataccatcacttacaagtgtccgctgttgagacagaacgagcctgaggacatcgactgctggtgtaacagcacttccacctgggtcacctacggcacttgcactaccaccggagaacaccggcgcgagaagaggagcgtggctcttgtgccgcacgtcggcatgggactcgagactcggaccgaaacctggatgtcatccgaaggagcctggaaacacgcccaacggatcgaaatttggatcctgagacaccccggtttcactatcatggccgcaatcctggcgtacactattggcaccacgcacttccagagggccctcattttcatcctcctgactgccgtggcgccatccatgaccatgagatgtattggcatttccaaccgcgatttcgtggagggagtgtccggaggatcctgggtcgacatcgtgctggaacacggatcttgcgtcaccaccatggctaagaacaagcccaccctcgacttcgagctgatcaagacagaagccaagcagccggccaccctccgcaagtattgcattgaagccaagcttaccaacaccaccaccgagtcgcggtgcccaacccaaggagagccgagcctcaatgaggaacaggacaagcgcttcgtgtgcaaacacagcatggtcgaccggggttggggcaacggatgtggcctgttcgggaagggtggcattgtgacttgcgcaatgttcacttgcaagaagaacatggaggggaaagtggtgcaacccgagaacctggagtacaccatcgtcgtgaccccacactccggagaggagcacgccgtgggaaacgacacggggaagcatggaaaggagatcaaggtcacaccccaatcatctattaccgaggccgaactgaccggatacggtactgtgacgatggagtgcagcccgaggactggactggacttcaacgaaatggtgctgctgcaaatggagaacaaggcctggctcgtgcaccggcagtggtttctggatctcccactgccgtggttgccgggagccgacacccaggggtcgaactggatccagaaggaaactcttgtgacgtttaagaatcctcacgcgaagaagcaggacgtggtggtcctgggatcgcaggaaggagctatgcacaccgctctgaccggcgccactgagatccagatgtcctcgggcaacctcctgttcaccggtcatctgaagtgccggctgcggatggacaaattgcagctgaaggggatgtcctactccatgtgcaccgggaagttcaaggtcgtgaaggagatcgcggaaactcagcacggcaccattgtcattagagtgcagtacgagggagatggttcaccgtgcaagataccgttcgaaatcatggacctggaaaagagacatgtcttgggacgcctgatcactgtgaaccctatcgtgaccgaaaaggactcccctgtgaacatcgaggcggagccgcctttcggcgactcctacatcattatcggagtggagcccgggcagctgaagctcaactggtttaagaaggggtccagcatcggccagatgttcgaaaccaccatgcggggggcgaagaggatggcgatcctgggagacaccgcctgggatttcggttcactgggcggagtgttcacctccatcggaaaggccctgcaccaagtgttcggcgcaatctacggtgctgccttctcgggagtctcctggaccatgaagatcctgatcggcgtgattatcacatggatcggcatgaacagccggtcaacctccctttccgtgtccctggtgctggtcggcatcgtgactctgtacctgggcgtgatggtgcaggcctga

SEQ ID NO: 256 - RNA, 2058 nt, unidentified
  source 1..2058: mol_type = genomic RNA; note = Dengue Virus
atgctgaacattctgaaccggagaagaagaaccgccggcattattatcatgatgattcccactgtgatggcatttcacctgaccacccggaacggagaacctcatatgatcgtgtcgagacaggagaagggaaagtccctgctgttcaagacagaaaacggagtgaacatgtgcaccctgatggccatggatctcggcgaactgtgcgaggatactatcacctacaactgtccgttgctgcgccaaaacgagccggaggacatcgactgctggtgtaactccacgtcgacctgggtcacctacggcacttgcaccgcgaccggcgaacacagaagagagaaacgctccgtcgctctggtgccgcacgtcgggatggggcttgaaacccggactgaaacctggatgagctcggagggcgcttggaagcatgcccagcgcatcgaaacttgggtgctgaggcatccaggcttcacaatcatggccgccatcctcgcgtacaccatcggtactacgtacttccagcgggtgttgatcttcattctgctgaccgccgtggcccctagcatgaccatgcggtgcatcgggatctccaaccgcgatttcgtggagggggtgtccggtggaagctgggtggacattgtgctggagcacggctcgtgcgtgaccaccatggccaagaacaagcccacccttgattttgagctgatcaagaccgaagcgaaacaccccgcgaccctccggaagtactgcattgaagccaagctcaccaacactaccacggcctcccggtgccctacccaaggagaaccttccttgaacgaagaacaggacaagcgcttcgtgtgcaagcattcaatggtggaccggggctggggaaatggctgtggcctcttcggaaaaggcggaattgtgacttgcgcaatgttcacttgcaagaagaacatggagggaaagattgtgcagcccgagaacctcgagtacactattgtcatcactccccactccggcgaagaaaacgctgtcggcaacgacaccggaaagcatggaaaggagatcaaggtcaccccgcaatcctcaattactgaggcagaactgaccggttacggaactgtgactatggagtgttcccctcgcaccggcctcgatttcaacgagatggtgctgctgcaaatggagaacaaggcctggctggtgcaccggcagtggttcctcgatttgcccctgccgtggctgccgggagccgacactcagggatccaactggatccagaaagaaaccctcgtgaccttcaaaaacccccacgcgaagaagcaggacgtggtggtgctgggttcccaagaaggggcgatgcataccgccctgactggtgctaccgaaatccagatgtcaagcggaaatctcctgtttaccggtcacctgaagtgcaggctccggatggacaagttgcagctgaaggggatgtcgtacagcatgtgtactgggaagttcaaggtcgtgaaggagattgccgaaacccagcacggaaccatagtcatcagggtccagtacgagggcgacggcagcccttgcaagatcccgttcgagatcatggatctggagaagcgacacgtgctgggccggcttatcactgtgaatccaatcgtgaccgagaaagactcgcccgtgaacatcgaagccgagccgccgttcggcgactcatacatcatcatcggcgtggaaccaggacagctgaagctgtcatggttcaagaagggttccagcattggtcagatgttcgaaacaacgatgcgcggagccaagcgcatggctatccttggggacaccgcctgggacttcgggtcgctgggaggagtgtttaccagcatcggaaaggccctgcaccaagtgttcggtgccatctacggagccgcattttccggagtgtcgtggactatgaagattctgatcggcgtcgtgattacctggatcgggatgaactccaggtctacttccctctccgtgagcctggtgctggtcggcgtggtcaccctgtatctgggcgtgatggtccaggcttag

SEQ ID NO: 257-258 - skipped (2 entries)

SEQ ID NO: 259 - protein, 3389 aa, unidentified
  source 1..3389: note = Dengue Virus
MNNQRKKTGRPSFNMLKRARNRVSTVSQLAKRFSKGLLSGQGPMKLVMAFIAFLRFLAIPPTAGILARWGSFKKNGAIKVLRGFKKEISNMLNIMNRRKRSVTMLLMLLPTALAFHLTTRGGEPHMIVSKQERGKSLLFKTSAGVNMCTLIAMDLGELCEDTMTYKCPRITETEPDDVDCWCNATETWVTYGTCSQTGEHRRDKRSVALAPHVGLGLETRTETWMSSEGAWKQIQKVETWALRHPGFTVIALFLAHAIGTSITQKGIIFILLMLVTPSMAMRCVGIGNRDFVEGLSGATWVDVVLEHGSCVTTMAKDKPTLDIELLKTEVTNPAVLRKLCIEAKISNTTTDSRCPTQGEATLVEEQDTNFVCRRTFVDRGWGNGCGLFGKGSLITCAKFKCVTKLEGKIVQYENLKYSVIVTVHTGDQHQVGNETTEHGTTATITPQAPTSEIQLTDYGALTLDCSPRTGLDFNEMVLLTMKKKSWLVHKQWFLDLPLPWTSGASTSQETWNRQDLLVTFKTAHAKKQEVVVLGSQEGAMHTALTGATEIQTSGTTTIFAGHLKCRLKMDKLILKGMSYVMCTGSFKLEKEVAETQHGTVLVQVKYEGTDAPCKIPFSSQDEKGVTQNGRLITANPIVTDKEKPVNIEAEPPFGESYIVVGAGEKALKLSWFKKGSSIGKMFEATARGARRMAILGDTAWDFGSIGGVFTSVGKLIHQIFGTAYGVLFSGVSWTMKIGIGILLTWLGLNSRSTSLSMTCIAVGMVTLYLGVMVQADSGCVINWKGRELKCGSGIFVTNEVHTWTEQYKFQADSPKRLSAAIGKAWEEGVCGIRSATRLENIMWKQISNELNHILLENDMKFTVVVGDVSGILAQGKKMIRPQPMEHKYSWKSWGKAKIIGADVQNTTFIIDGPNTPECPDNQRAWNIWEVEDYGFGIFTTNIWLKLRDSYTQVCDHRLMSAAIKDSKAVHADMGYWIESEKNETWKLARASFIEVKTCIWPKSHTLWSNGVLESEMIIPKIYGGPISQHNYRPGYFTQTAGPWHLGKLELDFDLCEGTTVVVDEHCGNRGPSLRTTTVTGKTIHEWCCRSCTLPPLRFKGEDGCWYGMEIRPVKEKEENLVKSMVSAGSGEVDSFSLGLLCISIMIEEVMRSRWSRKMLMTGTLAVFLLLTMGQLTWNDLIRLCIMVGANASDKMGMGTTYLALMATFRMRPMFAVGLLFRRLTSREVLLLTVGLSLVASVELPNSLEELGDGLAMGIMMLKLLTDFQSHQLWATLLSLTFVKTTFSLHYAWKTMAMILSIVSLFPLCLSTTSQKTTWLPVLLGSLGCKPLTMFLITENKIWGRKSWPLNEGIMAVGIVSILLSSLLKNDVPLAGPLIAGGMLIACYVISGSSADLSLEKAAEVSWEEEAEHSGASHNILVEVQDDGTMKIKDEERDDTLTILLKATLLAISGVYPMSIPATLFVWYFWQKKKQRSGVLWDTPSPPEVERAVLDDGIYRILQRGLLGRSQVGVGVFQEGVFHTMWHVTRGAVLMYQGKRLEPSWASVKKDLISYGGGWRFQGSWNAGEEVQVIAVEPGKNPKNVQTAPGTFKTPEGEVGAIALDFKPGTSGSPIVNREGKIVGLYGNGVVTTSGTYVSAIAQAKASQEGPLPEIEDEVFRKRNLTIMDLHPGSGKTRRYLPAIVREAIKRKLRTLVLAPTRVVASEMAEALKGMPIRYQTTAVKSEHTGKEIVDLMCHATFTMRLLSPVRVPNYNMIIMDEAHFTDPASIAARGYISTRVGMGEAAAIFMTATPPGSVEAFPQSIQDEERDIPERSWNSGYDWITDFPGKTVWFVPSIKSGNDIANCLRKNGKRVVQLSRKTFDTEYQKTKNNDWDYVVTTDISEMGANFRADRVIDPRRCLKPVILKDGPERVILAGPMPVTVASAAQRRGRIGRNQNKEGDQYIYMGQPLNNDEDHAHWTEAKMLLDNINTPEGIIPALFEPEREKSAAIDGEYRLRGEARKTFVELMRRGDLPVWLSYKVASEGFQYSDRRWCFDGERNNQVLEENMDVEIWTKEGERKKLRPRWLDARTYSDPLALREFKEFAAGRRSVSGDLILEIGKLPQHLTQRAQNALDNLVMLHNSEQGGKAYRHAMEELPDTIETLMLLALIAVLTGGVTLFFLSGRGLGKTSIGLLCVIASSALLWMASVEPHWIAASIILEFFLMVLLIPEPDRQRTPQDNQLAYVVIGLLFMILTVAANEMGLLETTKKDLGIGHAAAENHHHAAMLDVDLHPASAWTLYAVATTIITPMMRHTIENTTANISLTAIANQAAILMGLDKGWPISKMDIGVPLLALGCYSQVNPLTLTAAVLMLVAHYAIIGPGLQAKATREAQKRTAAGIMKNPTVDGIVAIDLDPVVYDAKFEKQLGQIMLLILCTSQILLMRTTWALCESITLATGPLTTLWEGSPGKFWNTTIAVSMANIFRGSYLAGAGLAFSLMKSLGGGRRGTGAQGETLGEKWKRQLNQLSKSEFNTYKRSGIIEVDRSEAKEGLKRGETTKHAVSRGTAKLRWFVERNLVKPEGKVIDLGCGRGGWSYYCAGLKKVTEVKGYTKGGPGHEEPIPMATYGWNLVKLYSGKDVFFTPPEKCDTLLCDIGESSPNPTIEEGRTLRVLKMVEPWLRGNQFCIKILNPYMPSVVETLEQMQRKHGGMLVRNPLSRNSTHEMYWVSCGTGNIVSAVNMTSRMLLNRFTMAHRKPTYERDVDLGAGTRHVAVEPEVANLDIIGQRIENIKNEHKSTWHYDEDNPYKTWAYHGSYEVKPSGSASSMVNGVVRLLTKPWDVIPMVTQIAMTDTTPFGQQRVFKEKVDTRTPKAKRGTAQIMEVTARWLWGFLSRNKKPRICTREEFTRKVRSNAAIGAVFVDENQWNSAKEAVEDERFWDLVHRERELHKQGKCATCVYNMMGKREKKLGEFGKAKGSRAIWYMWLGARFLEFEALGFMNEDHWFSRENSLSGVEGEGLHKLGYILRDISKIPGGNMYADDTAGWDTRITEDDLQNEAKITDIMEPEHALLATSIFKLTYQNKVVRVQRPAKNGTVMDVISRRDQRGSGQVGTYGLNTFTNMEAQLIRQMESEGIFSPSELETPNLAERVLDWLKKHGTERLKRMAISGDDCVVKPIDDRFATALTALNDMGKVRKDIPQWEPSKGWNDWQQVPFCSHHFHQLIMKDGREIVVPCRNQDELVGRARVSQGAGWSLRETACLGKSYAQMWQLMYFHRRDLRLAANAICSAVPVDWVPTSRTTWSIHAHHQWMTTEDMLSVWNRVWIEENPWMEDKTHVSSWEDVPYLGKREDQWCGSLIGLTARATWATNIQVAINQVRRLIGNENYLDFMTSMKRFKNESDPEGALW

SEQ ID NO: 260 - protein, 2535 aa, unidentified
  source 1..2535: note = Dengue Virus
MNNQRKKAKNTPFNMLKRERNRVSTVQQLTKRFSLGMLQGRGPLKLFMALVAFLRFLTIPPTAGILKRWGTIKKSKAINVLRGFRKEIGRMLNILNRRRRSAGMIIMLIPTVMAFHLTTRNGEPHMIVSRQEKGKSLLFKTEDGVNMCTLMAMDLGELCEDTITYKCPLLRQNEPEDIDCWCNSTSTWVTYGTCTTMGEHRREKRSVALVPHVGMGLETRTETWMSSEGAWKHVQRIETWILRHPGFTMMAAILAYTIGTTHFQRALIFILLTAVTPSMTMRCIGMSNRDFVEGVSGGSWVDIVLEHGSCVTTMAKNKPTLDFELIKTEAKQPATLRKYCIEAKLTNTTTESRCPTQGEPSLNEEQDKRFVCKHSMVDRGWGNGCGLFGKGGIVTCAMFRCKKNMEGKVVQPENLEYTIVITPHSGEEHAVGNDTGKHGKEIKITPQSSITEAELTGYGTVTMECSPRTGLDFNEMVLLQMENKAWLVHRQWFLDLPLPWLPGADTQGSNWIQKETLVTFKNPHAKKQDVVVLGSQEGAMHTALTGATEIQMSSGNLLFTGHLKCRLRMDKLQLKGMSYSMCTGKFKVVKEIAETQHGTIVIRVQYEGDGSPCKIPFEIMDLEKRHVLGRLITVNPIVTEKDSPVNIEAEPPFGDSYIIIGVEPGQLKLNWFKKGSSIGQMFETTMRGAKRMAILGDTAWDFGSLGGVFTSIGKALHQVFGAIYGAAFSGVSWTMKILIGVIITWIGMNSRSTSLSVTLVLVGIVTLYLGVMVQADSGCVVSWKNKELKCGSGIFITDNVHTWTEQYKFQPESPSKLASAIQKAHEEGICGIRSVTRLENLMWKQITPELNHILSENEVKLTIMTGDIKGIMQAGKRSLRPQPTELKYSWKTWGKAKMLSTESHNQTFLIDGPETAECPNTNRAWNSLEVEDYGFGVFTTNIWLKLKEKQDVFCDSKLMSAAIKDNRAVHADMGYWIESALNDTWKIEKASFIEVKNCHWPKSHTLWSNGVLESEMIIPKNLAGPVSQHNYRPGYHTQITGPWHLGKLEMDFDFCDGTTVVVTEDCGNRGPSLRTTTASGKLITEWCCRSCTLPPLRYRGEDGCWYGMEIRPLKEKEENLVNSLVTAGHGQVDNFSLGVLGMALFLEEMLRTRVGTKHAILLVAVSFVTLITGNMSFRDLGRVMVMVGATMTDDIGMGVTYLALLAAFKVRPTFAAGLLLRKLTSKELMMTTIGIVLLSQSTIPETILELTDALALGMMVLKMVRNMEKYQLAVTIMAILCVPILQNAWKVSCTILAVVSVSPLLLTSSQQKTDWIPLALTIKGLNPTAIFLTTLSRTSKKRSWPLNEAIMAVGMVSILASSLLKNDIPMTGPLVAGGLLTVCYVLTGRSADLELERAADVKWEDQAEISGSSPILSITISEDGSMSIKNEEEEQTLTILIRTGLLVISGLFPVSIPITAAAWYLWEVKKQRAGVLWDVPSPPPMGKAELEDGAYRIKQKGILGYSQIGAGVYKEGTFHTMWHVTRGAVLMHKGKRIEPSWADVKKDLISYGGGWKLEGEWKEGEEVQVLALEPGKNPRAVQTKPGLFKTNAGTIGAVSLDFSPGTSGSPIIDKKGKVVGLYGNGVVTRSGAYVSAIAQTEKSIEDNPEIEDDIFRKRRLTIMDLHPGAGKTKRYLPAIVREAIKRGLRTLILAPTRVVAAEMEEALRGLPIRYQTPAIRAEHTGREIVDLMCHATFTMRLLSPVRVPNYNLIIMDEAHFTDPASIAARGYISTRVEMGEAAGIFMTATPPGSRDPFPQSNAPIIDEEREIPERSWNSGHEWVTDFKGKTVWFVPSIKAGNDIAACLRKNGKKVIQLSRKTFDSEYVKTRTNDWDFVVTTDISEMGANFKAERVIDPRRCMKPVILTDGEERVILAGPMPVTHSSAAQRRGRIGRNPKNENDQYIYMGEPLENDEDCAHWKEAKMLLDNINTPEGIIPSMFEPEREKVDAIDGEYRLRGEARKTFVDLMRRGDLPVWLAYRVAAEGINYADRRWCFDGVKNNQILEENVEVEIWTKEGERKKLKPRWLDARIYSDPLALKEFKEFAAGRKSLTLNLITEMGRLPTFMTQKARDALDNLAVLHTAEAGGRAYNHALSELPETLETLLLLTLLATVTGGIFLFLMSGRGIGKMTLGMCCIITASILLWYAQIQPHWIAASIILEFFLIVLLIPEPEKQRTPQDNQLTYVVIAILTVVAATMANEMGFLEKTKKDLGLGSIATQQPESNILDIDLRPASAWTLYAVATTFVTPMLRHSIENSSVNVSLTAIANQATVLMGLGKGWPLSKMDIGVPLLAIGCYSQVNPITLTAALFLLVAHYAIIGPGLQAKATREAQKRAAAGIMKNPTVDGITVIDLDPIPYDPKFEKQLGQVMLLVLCVTQVLMMRTTWALCEALTLATGPISTLWEGNPGRFWNTTIAVSMANIFRGSYLAGAGLLFSIMKNTTNTRRGTGNIGETLGEKWKSRLNALGKSEFQIYKKSGIQEVDRTLAKEGIKR

SEQ ID NO: 261 - protein, 853 aa, unidentified
  source 1..853: note = Dengue Virus
GETDHHAVSRGSAKLRWFVERNMVTPEGKVVDLGCGRGGWSYYCGGLKNVREVKGLTKGGPGHEEPIPMSTYGWNLVRLQSGVDVFFIPPEKCDTLLCDIGESSPNPTVEAGRTLRVLNLVENWLNNNTQFCIKVLNPYMPSVIEKMEALQRKYGGALVRNPLSRNSTHEMYWVSNASGNIVSSVNMISRMLINRFTMRYKKATYEPDVDLGSGTRNIGIESEIPNLDIIGKRIEKIKQEHETSWHYDQDHPYKTWAYHGSYETKQTGSASSMVNGVVRLLTKPWDVVPMVTQMAMTDTTPFGQQRVFKEKVDTRTQEPKEGTKKLMKITAEWLWKELGKKKTPRMCTREEFTRKVRSNAALGAIFTDENKWKSAREAVEDSRFWELVDKERNLHLEGKCETCVYNMMGKREKKLGEFGKAKGSRAIWYMWLGARFLEFEALGFLNEDHWFSRENSLSGVEGEGLHKLGYILRDVSKKEGGAMYADDTAGWDTRITLEDLKNEEMVTNHMEGEHKKLAEAIFKLTYQNKVVRVQRPTPRGTVMDIISRRDQRGSGQVGTYGLNTFTNMEAQLIRQMEGEGVFKSIQHLTITEEIAVQNWLARVGRERLSRMAISGDDCVVKPLDDRFASALTALNDMGKIRKDIQQWEPSRGWNDWTQVPFCSHHFHELIMKDGRVLVVPCRNQDELIGRARISQGAGWSLRETACLGKSYAQMWSLMYFHRRDLRLAANAICSAVPSHWVPTSRTTWSIHAKHEWMTTEDMLTVWNRVWIQENPWMEDKTPVESWEEIPYLGKREDQWCGSLIGLTSRATWAKNIQAAINQVRSLIGNEEYTDYMPSMKRFRREEEEAGVLW

SEQ ID NO: 262 - protein, 3390 aa, unidentified
  source 1..3390: note = Dengue Virus
MNNQRKKTGKPSINMLKRVRNRVSTGSQLAKRFSKGLLNGQGPMKLVMAFIAFLRFLAIPPTAGVLARWGTFKKSGAIKVLKGFKKEISNMLSIINQRKKTSLCLMMILPAALAFHLTSRDGEPRMIVGKNERGKSLLFKTASGINMCTLIAMDLGEMCDDTVTYKCPHITEVEPEDIDCWCNLTSTWVTYGTCNQAGEHRRDKRSVALAPHVGMGLDTRTQTWMSAEGAWRQVEKVETWALRHPGFTILALFLAHYIGTSLTQKVVIFILLMLVTPSMTMRCVGVGNRDFVEGLSGATWVDVVLEHGGCVTTMAKNKPTLDIELQKTEATQLATLRKLCIEGKITNITTDSRCPTQGEAVLPEEQDQNYVCKHTYVDRGWGNGCGLFGKGSLVTCAKFQCLEPIEGKVVQYENLKYTVIITVHTGDQHQVGNETQGVTAEITPQASTTEAILPEYGTLGLECSPRTGLDFNEMILLTMKNKAWMVHRQWFFDLPLPWASGATTETPTWNRKELLVTFKNAHAKKQEVVVLGSQEGAMHTALTGATEIQNSGGTSIFAGHLKCRLKMDKLELKGMSYAMCTNTFVLKKEVSETQHGTILIKVEYKGEDAPCKIPFSTEDGQGKAHNGRLITANPVVTKKEEPVNIEAEPPFGESNIVIGIGDNALKINWYKKGSSIGKMFEATERGARRMAILGDTAWDFGSVGGVLNSLGKMVHQIFGSAYTALFSGVSWVMKIGIGVLLTWIGLNSKNTSMSFSCIAIGIITLYLGAVVQADMGCVINWKGKELKCGSGIFVTNEVHTWTEQYKFQADSPKRLATAIAGAWENGVCGIRSTTRMENLLWKQIANELNYILWENNIKLTVVVGDTLGVLEQGKRTLTPQPMELKYSWKTWGKAKIVTAETQNSSFIIDGPNTPECPSASRAWNVWEVEDYGFGVFTTNIWLKLREVYTQLCDHRLMSAAVKDERAVHADMGYWIESQKNGSWKLEKASLIEVKTCTWPKSHTLWTNGVLESDMIIPKSLAGPISQHNYRPGYHTQTAGPWHLGKLELDFNYCEGTTVVITESCGTRGPSLRTTTVSGKLIHEWCCRSCTLPPLRYMGEDGCWYGMEIRPISEKEENMVKSLVSAGSGKVDNFTMGVLCLAILFEEVLRGKFGKKHMIAGVFFTFVLLLSGQITWRDMAHTLIMIGSNASDRMGMGVTYLALIATFKIQPFLALGFFLRKLTSRENLLLGVGLAMATTLQLPEDIEQMANGVALGLMALKLITQFETYQLWTALVSLTCSNTIFTLTVAWRTATLILAGVSLLPVCQSSSMRKTDWLPMTVAAMGVPPLPLFIFSLKDTLKRRSWPLNEGVMAVGLVSILASSLLRNDVPMAGPLVAGGLLIACYVITGTSADLTVEKAPDVTWEEEAEQTGVSHNLMITVDDDGTMRIKDDETENILTVLLKTALLIVSGIFPYSIPATLLVWHTWQKQTQRSGVLWDVPSPPETQKAELEEGVYRIKQQGIFGKTQVGVGVQKEGVFHTMWHVTRGAVLTHNGKRLEPNWASVKKDLISYGGGWRLSAQWQKGEEVQVIAVEPGKNPKNFQTTPGTFQTTTGEIGAIALDFKPGTSGSPIINREGKVVGLYGNGVVTKNGGYVSGIAQTNAEPDGPTPELEEEMFKKRNLTIMDLHPGSGKTRKYLPAIVREAIKRRLRTLILAPTRVVAAEMEEALKGLPIRYQTTATKSEHTGREIVDLMCHATFTMRLLSPVRVPNYNLIIMDEAHFTDPASIAARGYISTRVGMGEAAAIFMTATPPGTADAFPQSNAPIQDEERDIPERSWNSGNEWITDFAGKTVWFVPSIKAGNDIANCLRKNGKKVIQLSRKTFDTEYQKTKLNDWDFVVTTDISEMGANFKADRVIDPRRCLKPVILTDGPERVILAGPMPVTAASAAQRRGRVGRNPQKENDQYIFTGQPLNNDEDHAHWTEAKMLLDNINTPEGIIPALFEPEREKSAAIDGEYRLKGESRKTFVELMRRGDLPVWLAHKVASEGIKYTDRKWCFDGQRNNQILEENMDVEIWTKEGEKKKLRPRWLDARTYSDPLALKEFKDFAAGRKSIALDLVTEIGRVPSHLAHRTRNALDNLVMLHTSEDGGRAYRHAVEELPETMETLLLLGLMILLTGGAMLFLISGKGIGKTSIGLICVIASSGMLWMAEVPLQWIASAIVLEFFMMVLLIPEPEKQRTPQDNQLAYVVIGILTLAATIAANEMGLLETTKRDLGMSKEPGVVSPTSYLDVDLHPASAWTLYAVATTVITPMLRHTIENSTANVSLAAIANQAVVLMGLDKGWPISKMDLGVPLLALGCYSQVNPLTLTAAVLLLITHYAIIGPGLQAKATREAQKRTAAGIMKNPTVDGIMTIDLDSVIFDSKFEKQLGQVMLLVLCAVQLLLMRTSWALCEALTLATGPITTLWEGSPGKFWNTTIAVSMANIFRGSYLAGAGLAFSIMKSVGTGKRGTGSQGETLGEKWKKKLNQLSRKEFDLYKKSGITEVDRTEAKEGLKRGETTHHAVSRGSAKLQWFVERNMVVPEGRVIDLGCGRGGWSYYCAGLKKVTEVRGYTKGGPGHEEPVPMSTYGWNIVKLMSGKDVFYLPPEKCDTLLCDIGESSPSPTVEESRTIRVLKMVEPWLKNNQFCIKVLNPYMPTVIEHLERLQRKHGGMLVRNPLSRNSTHEMYWISNGTGNIVSSVNMVSRLLLNRFTMTHRRPTIEKDVDLGAGTRHVNAEPETPNMDVIGERIKRIKEEHNSTWHYDDENPYKTWAYHGSYEVKATGSASSMINGVVKLLTKPWDVVPMVTQMAMTDTTPFGQQRVFKEKVDTRTPRPMPGTRKAMEITAEWLWRTLGRNKRPRLCTREEFTKKVRTNAAMGAVFTEENQWDSAKAAVEDEEFWKLVDRERELHKLGKCGSCVYNMMGKREKKLGEFGKAKGSRAIWYMWLGARYLEFEALGFLNEDHWFSRENSYSGVEGEGLHKLGYILRDISKIPGGAMYADDTAGWDTRITEDDLHNEEKIIQQMDPEHRQLANAIFKLTYQNKVVKVQRPTPTGTVMDIISRKDQRGSGQLGTYGLNTFTNMEAQLVRQMEGEGVLTKADLENPHLLEKKITQWLETKGVERLKRMAISGDDCVVKPIDDRFANALLALNDMGKVRKDIPQWQPSKGWHDWQQVPFCSHHFHELIMKDGRKLVVPCRPQDELIGRARISQGAGWSLRETACLGKAYAQMWSLMYFHRRDLRLASNAICSAVPVHWVPTSRTTWSIHAHHQWMTTEDMLTVWNRVWIEENPWMEDKTPVTTWENVPYLGKREDQWCGSLIGLTSRATWAQNIPTAIQQVRSLIGNEEFLDYMPSMKRFRKEEESEGAIW

SEQ ID NO: 263 - protein, 3387 aa, synthetic construct
  REGION 1..3387: note = Synthetic Polynucleotide
MNQRKKVVRPPFNMLKRERNRVSTPQGLVKRFSTGLFSGKGPLRMVLAFITFLRVLSIPPTAGILKRWGQLKKNKAIKILIGFRKEIGRMLNILNGRKRSTITLLCLIPTVMAFSLSTRDGEPLMIVAKHERGRPLLFKTTEGINKCTLIAMDLGEMCEDTVTYKCPLLVNTEPEDIDCWCNLTSTWVMYGTCTQSGERRREKRSVALTPHSGMGLETRAETWMSSEGAWKHAQRVESWILRNPGFALLAGFMAYMIGQTGIQRTVFFVLMMLVAPSYGMRCVGVGNRDFVEGVSGGAWVDLVLEHGGCVTTMAQGKPTLDFELTKTTAKEVALLRTYCIEASISNITTATRCPTQGEPYLKEEQDQQYICRRDVVDRGWGNGCGLFGKGGVVTCAKFSCSGKITGNLVQIENLEYTVVVTVHNGDTHAVGNDTSNHGVTAMITPRSPSVEVKLPDYGELTLDCEPRSGIDFNEMILMKMKKKTWLVHKQWFLDLPLPWTAGADTSEVHWNYKERMVTFKVPHAKRQDVTVLGSQEGAMHSALAGATEVDSGDGNHMFAGHLKCKVRMEKLRIKGMSYTMCSGKFSIDKEMAETQHGTTVVKVKYEGAGAPCKVPIEIRDVNKEKVVGRIISSTPLAENTNSVTNIELEPPFGDSYIVIGVGNSALTLHWFRKGSSIGKMFESTYRGAKRMAILGETAWDFGSVGGLFTSLGKAVHQVFGSVYTTMFGGVSWMIRILIGFLVLWIGTNSRNTSMAMTCIAVGGITLFLGFTVQADMGCVASWSGKELKCGSGIFVVDNVHTWTEQYKFQPESPARLASAILNAHKDGVCGIRSTTRLENVMWKQITNELNYVLWEGGHDLTVVAGDVKGVLTKGKRALTPPVSDLKYSWKTWGKAKIFTPEARNSTFLIDGPDTSECPNERRAWNSLEVEDYGFGMFTTNIWMKFREGSSEVCDHRLMSAAIKDQKAVHADMGYWIESSKNQTWQIEKASLIEVKTCLWPKTHTLWSNGVLESQMLIPKSYAGPFSQHNYRQGYATQTVGPWHLGKLEIDFGECPGTTVTIQEDCDHRGPSLRTTTASGKLVTQWCCRSCTMPPLRFLGEDGCWYGMEIRPLSEKEENMVKSQVTAGQGTSETFSMGLLCLTLFVEECLRRRVTRKHMILVVVITLCAIILGGLTWMDLLRALIMLGDTMSGRIGGQIHLAIMAVFKMSPGYVLGVFLRKLTSRETALMVIGMAMTTVLSIPHDLMELIDGISLGLILLKIVTQFDNTQVGTLALSLTFIRSTMPLVMAWRTIMAVLFVVTLIPLCRTSCLQKQSHWVEITALILGAQALPVYLMTLMKGASRRSWPLNEGIMAVGLVSLLGSALLKNDVPLAGPMVAGGLLLAAYVMSGSSADLSLEKAANVQWDEMADITGSSPIVEVKQDEDGSFSIRDVEETNMITLLVKLALITVSGLYPLAIPVTMTLWYMWQVKTQRSGALWDVPSPAATKKAALSEGVYRIMQRGLFGKTQVGVGIHMEGVFHTMWHVTRGSVICHETGRLEPSWADVRNDMISYGGGWRLGDKWDKEEDVQVLAIEPGKNPKHVQTKPGLFKTLTGEIGAVTLDFKPGTSGSPIINRKGKVIGLYGNGVVTKSGDYVSAITQAERIGEPDYEVDEDIFRKKRLTIMDLHPGAGKTKRILPSIVREALKRRLRTLILAPTRVVAAEMEEALRGLPIRYQTPAVKSEHTGREIVDLMCHATFTTRLLSSTRVPNYNLIVMDEAHFTDPSSVAARGYISTRVEMGEAAAIFMTATPPGATDPFPQSNSPIEDIEREIPERSWNTGFDWITDYQGKTVWFVPSIKAGNDIANCLRKSGKKVIQLSRKTFDTEYPKTKLTDWDFVVTTDISEMGANFRAGRVIDPRRCLKPVILPDGPERVILAGPIPVTPASAAQRRGRIGRNPAQEDDQYVFSGDPLKNDEDHAHWTEAKMLLDNIYTPEGIIPTLFGPEREKTQAIDGEFRLRGEQRKTFVELMRRGDLPVWLSYKVASAGISYEDREWCFTGERNNQILEENMEVEIWTREGEKKKLRPRWLDARVYADPMALKDFKEFASGRKSITLDILTEIASLPTYLSSRAKLALDNIVMLHTTERGGRAYQHALNELPESLETLMLVALLGAMTAGIFLFFMQGKGIGKLSMGLITIAVASGLLWVAEIQPQWIAASIILEFFLMVLLIPEPEKQRTPQDNQLIYVILTILTIIGLIAANEMGLIEKTKTDFGFYQVKTETTILDVDLRPASAWTLYAVATTILTPMLRHTIENTSANLSLAAIANQAAVLMGLGKGWPLHRMDLGVPLLAMGCYSQVNPTTLTASLVMLLVHYAIIGPGLQAKATREAQKRTAAGIMKNPTVDGITVIDLEPISYDPKFEKQLGQVMLLVLCAGQLLLMRTTWAFCEVLTLATGPILTLWEGNPGRFWNTTIAVSTANIFRGSYLAGAGLAFSLIKNAQTPRRGTGTTGETLGEKWKRQLNSLDRKEFEEYKRSGILEVDRTEAKSALKDGSKIKHAVSRGSSKIRWIVERGMVKPKGKVVDLGCGRGGWSYYMATLKNVTEVKGYTKGGPGHEEPIPMATYGWNLVKLHSGVDVFYKPTEQVDTLLCDIGESSSNPTIEEGRTLRVLKMVEPWLSSKPEFCIKVLNPYMPTVIEELEKLQRKHGGNLVRCPLSRNSTHEMYWVSGASGNIVSSVNTTSKMLLNRFTTRHRKPTYEKDVDLGAGTRSVSTETEKPDMTIIGRRLQRLQEEHKETWHYDQENPYRTWAYHGSYEAPSTGSASSMVNGVVKLLTKPWDVIPMVTQLAMTDTTPFGQQRVFKEKVDTRTPQPKPGTRMVMTTTANWLWALLGKKKNPRLCTREEFISKVRSNAAIGAVFQEEQGWTSASEAVNDSRFWELVDKERALHQEGKCESCVYNMMGKREKKLGEFGRAKGSRAIWYMWLGARFLEFEALGFLNEDHWFGRENSWSGVEGEGLHRLGYILEEIDKKDGDLMYADDTAGWDTRITEDDLQNEELITEQMAPHHKILAKAIFKLTYQNKVVKVLRPTPRGAVMDIISRKDQRGSGQVGTYGLNTFTNMEVQLIRQMEAEGVITQDDMQNPKGLKERVEKWLKECGVDRLKRMAISGDDCVVKPLDERFGTSLLFLNDMGKVRKDIPQWEPSKGWKNWQEVPFCSHHFHKIFMKDGRSLVVPCRNQDELIGRARISQGAGWSLRETACLGKAYAQMWSLMYFHRRDLRLASMAICSAVPTEWFPTSRTTWSIHAHHQWMTTEDMLKVWNRVWIEDNPNMTDKTPVHSWEDIPYLGKREDLWCGSLIGLSSRATWAKNIHTAITQVRNLIGKEEYVDYMPVMKRYSAPSESEGVL

SEQ ID NO: 264 - protein, 680 aa, synthetic construct
  REGION 1..680: note = Synthetic Polynucleotide
MDAMKRGLCCVLLLCGAVFVSPFHLTTRNGEPHMIVSRQEKGKSLLFKTENGVNMCTLMAMDLGELCEDTITYNCPLLRQNEPEDIDCWCNSTSTWVTYGTCTATGEHRREKRSVALVPHVGMGLETRTETWMSSEGAWKHAQRIETWVLRHPGFTIMAAILAYTIGTTYFQRVLIFILLTAVAPSMTMRCIGISNRDFVEGVSGGSWVDIVLEHGSCVTTMAKNKPTLDFELIKTEAKHPATLRKYCIEAKLTNTTTASRCPTQGEPSLNEEQDKRFVCKHSMVDRGWGNGCGLFGKGGIVTCAMFTCKKNMEGKIVQPENLEYTIVITPHSGEEGNDTGKHGKEIKVTPQSSITEAELTGYGTVTMECSPRTGLDFNEMVLLQMENKAWLVHRQWFLDLPLPWLPGADTQGSNWIQKETLVTFKNPHAKKQDVVVLGSQEGAMHTALTGATEIQMSSGNLLFTGHLKCRLRMDKLQLKGMSYSMCTGKFKVVKEIAETQHGTIVIRVQYEGDGSPCKIPFEIMDLEKRHVLGRLITVNPIVTEKDSPVNIEAEPPFGDSYIIIGVEPGQLKLSWFKKGSSIGQMFETTMRGAKRMAILGDTAWDFGSLGGVFTSIGKALHQVFGAIYGAAFSGVSWTMKILIGVVITWIGMNSRSTSLSVSLVLVGVVTLYLGVMVQA

SEQ ID NO: 265 - protein, 580 aa, synthetic construct
  REGION 1..580: note = Synthetic Polynucleotide
MDAMKRGLCCVLLLCGAVFVSPFHLTTRNGEPHMIVSRQEKGKSLLFKTENGVNMCTLMAMDLGELCEDTITYNCPLLRQNEPEDIDCWCNSTSTWVTYGTCTATGEHRREKRSVALVPHVGMGLETRTETWMSSEGAWKHAQRIETWVLRHPGFTIMAAILAYTIGTTYFQRVLIFILLTAVAPSMTMRCIGISNRDFVEGVSGGSWVDIVLEHGSCVTTMAKNKPTLDFELIKTEAKHPATLRKYCIEAKLTNTTTASRCPTQGEPSLNEEQDKRFVCKHSMVDRGWGNGCGLFGKGGIVTCAMFTCKKNMEGKIVQPENLEYTIVITPHSGEEGNDTGKHGKEIKVTPQSSITEAELTGYGTVTMECSPRTGLDFNEMVLLQMENKAWLVHRQWFLDLPLPWLPGADTQGSNWIQKETLVTFKNPHAKKQDVVVLGSQEGAMHTALTGATEIQMSSGNLLFTGHLKCRLRMDKLQLKGMSYSMCTGKFKVVKEIAETQHGTIVIRVQYEGDGSPCKIPFEIMDLEKRHVLGRLITVNPIVTEKDSPVNIEAEPPFGDSYIIIGVEPGQLKLSWFKKG

SEQ ID NO: 266 - protein, 845 aa, synthetic construct
  REGION 1..845: note = Synthetic Polynucleotide
MDAMKRGLCCVLLLCGAVFVSPFHLTTRNGEPHMIVSRQEKGKSLLFKTENGVNMCTLMAMDLGELCEDTITYNCPLLRQNEPEDIDCWCNSTSTWVTYGTCTATGEHRREKRSVALVPHVGMGLETRTETWMSSEGAWKHAQRIETWVLRHPGFTIMAAILAYTIGTTYFQRVLIFILLTAVAPSMTMRCIGISNRDFVEGVSGGSWVDIVLEHGSCVTTMAKNKPTLDFELIKTEAKHPATLRKYCIEAKLTNTTTASRCPTQGEPSLNEEQDKRFVCKHSMVDRGWGNGCGLFGKGGIVTCAMFTCKKNMEGKIVQPENLEYTIVITPHSGEEGNDTGKHGKEIKVTPQSSITEAELTGYGTVTMECSPRTGLDFNEMVLLQMENKAWLVHRQWFLDLPLPWLPGADTQGSNWIQKETLVTFKNPHAKKQDVVVLGSQEGAMHTALTGATEIQMSSGNLLFTGHLKCRLRMDKLQLKGMSYSMCTGKFKVVKEIAETQHGTIVIRVQYEGDGSPCKIPFEIMDLEKRHVLGRLITVNPIVTEKDSPVNIEAEPPFGDSYIIIGVEPGQLKLSWFKKGGGGGSGGGGSGGGGSEVKLQQSGTEVVKPGASVKLSCKASGYIFTSYDIDWVRQTPEQGLEWIGWIFPGEGSTEYNEKFKGRATLSVDKSSSTAYMELTRLTSEDSAVYFCARGDYYRRYFDLWGQGTTVTVSSGGGGSGGGGSGGGGSDIQMTQSPSFLSTSLGNSITITCHASQNIKGWLAWYQQKSGNAPQLLIYKASSLQSGVPSRFSGSGSGTDYIFTISNLQPEDIATYYCQHYQSFPWTFGGGTKLEIKRDYKDDDDK

SEQ ID NO: 267 - protein, 305 aa, unidentified
  source 1..305: note = Dengue Virus
MDWTWILFLVAAATRVHSKGMSYSMCTGKFKVVKEIAETQHGTIVIRVQTEGDGSPCKIPFEIMDLEKRHVLGRLITVNPIVTEKDSPVNIEAEPPFGDSYIIIGVEPGQLKLNWFKKGSSIGQMFETTMRGAKRMAILSGGDIIKLLNEQVNKEMQSSNLYMSMSSWCYTHSLDGAGLFLFDHAAEEYEHAKKLIIFLNENNVPVQLTSISAPEHKFEGLTQIFQKAYEHEQHISESINNIVDHAIKSKDHATFNFLQWYVAEQHEEEVLFKDILDKIELIGNENHGLYLADQYVKGIAKSRKS

SEQ ID NO: 268 - protein, 685 aa, unidentified
  source 1..685: note = Dengue Virus
MLNILNRRRRTAGIIIMMIPTVMAFHLTTRNGEPHMIVSRQEKGKSLLFKTEDGVNMCTLMAMDLGELCEDTITYKCPLLRQNEPEDIDCWCNSTSTWVTYGTCTTTGEHRREKRSVALVPHVGMGLETRTETWMSSEGAWKHAQRIETWILRHPGFTIMAAILAYTIGTTHFQRALIFILLTAVAPSMTMRCIGISNRDFVEGVSGGSWVDIVLEHGSCVTTMAKNKPTLDFELIKTEAKQPATLRKYCIEAKLTNTTTESRCPTQGEPSLNEEQDKRFVCKHSMVDRGWGNGCGLFGKGGIVTCAMFTCKKNMEGKIVQPENLEYTIVVTPHSGEEHAVGNDTGKHGKEIKVTPQSSITEAELTGYGTVTMECSPRTGLDFNEMVLLQMENKAWLVHRQWFLDLPLPWLPGADTQGSNWIQKETLVTFKNPHAKKQDVVVLGSQEGAMHTALTGATEIQMSSGNLLFTGHLKCRLRMDKLQLKGMSYSMCTGKFKVVKEIAETQHGTIVIRVQYEGDGSPCKIPFEIMDLEKRHVLGRLITVNPIVTEKDSPVNIEAEPPFGDSYIIIGVEPGQLKLNWFKKGSSIGQMFETTMRGAKRMAILGDTAWDFGSLGGVFTSIGKALHQVFGAIYGAAFSGVSWTMKILIGVIITWIGMNSRSTSLSVSLVLVGIVTLYLGVMVQA

SEQ ID NO: 269 - protein, 685 aa, unidentified
  source 1..685: note = Dengue Virus
MLNILNRRRRTAGIIIMMIPTVMAFHLTTRNGEPHMIVGRQEKGKSLLFKTEDGVNMCTLMAIDLGELCEDTITYKCPLLRQNEPEDIDCWCNSTSTWVTYGTCATTGEHRREKRSVALVPHVGMGLETRTETWMSSEGAWKHVQRIETWILRHPGFTIMAAILAYTIGTTHFQRALIFILLTAVAPSMTMRCIGMSNRDFVEGVSGGSWVDIVLEHGSCVTTMAKNKPTLDFELIKTEAKQPATLRKYCIEAKLTNTTTESRCPTQGEPSLNEEQDKRFVCKHSMVDRGWGNGCGLFGKGGIVTCAMFRCKKNMEGKVVQPENLEYTIVITPHSGEEHAVGNDTGKHGKEIKITPQSSTTEAELTGYGTVTMECSPRTGLDFNEMVLLQMENKAWLVHRQWFLDLPLPWLPGADTQGSNWIQKETLVTFKNPHAKKQDVVVLGSQEGAMHTALTGATEIQMSSGNLLFTGHLKCRLRMDKLQLKGMSYSMCTGKFKVVKEIAETQHGTIVIRVQYEGDGSPCKIPFEIMDLEKRHVLGRLITVNPIVTEKDSPVNIEAEPPFGDSYIIIGVEPGQLKLNWFKKGSSIGQMFETTMRGAKRMAILGDTAWDFGSLGGVFTSIGKALHQVFGAIYGAAFSGVSWTMKILIGVIITWIGMNSRSTSLSVTLVLVGIVTLYLGVMVQA

SEQ ID NO: 270 - protein, 685 aa, unidentified
  source 1..685: note = Dengue Virus
MLNILNRRRRTAGIIIMMIPTVMAFHLTTRNGEPHMIVGRQEKGKSLLFKTEDGVNMCTLMAIDLGELCEDTITYKCPLLRQNEPEDIDCWCNSTSTWVTYGTCATTGEHRREKRSVALVPHVGMGLETRTETWMSSEGAWKHVQRIETWILRHPGFTIMAAILAYTIGTTHFQRALIFILLTAVAPSMTMRCIGISNRDFVEGVSGGSWVDIVLEHGSCVTTMAKNKPTLDFELIKTEAKQPATLRKYCIEAKLTNTTTESRCPTQGEPSLNEEQDKRFLCKHSMVDRGWGNGCGLFGKGGIVTCAMFTCKKNMEGKVVLPENLEYTIVITPHSGEEHAVGNDTGKHGKEIKITPQSSITEAELTGYGTVTMECSPRTGLDFNEMVLLQMEDKAWLVHRQWFLDLPLPWLPGADTQGSNWIQKETLVTFKNPHAKKQDVVVLGSQEGAMHTALTGATEIQMSSGNLLFTGHLKCRLRMDKLQLKGMSYSMCTGKFKIVKEIAETQHGTIVIRVQYEGDGSPCKIPFEIMDLEKRHVLGRLITVNPIVTEKDSPVNIEAEPPFGDSYIIIGVEPGQLKLNWFKKGSSIGQMFETTMRGAKRMAILGDTAWDFGSLGGVFTSIGKALHQVFGAIYGAAFSGVSWTMKILIGVIITWIGMNSRSTSLSVSLVLVGVVTLYLGAMVQA

SEQ ID NO: 271 - protein, 685 aa, unidentified
  source 1..685: note = Dengue Virus
MLNILNRRRRTAGIIIMMIPTVMAFHLTTRNGEPHMIVSRQEKGKSLLFKTEDGVNMCTLMAMDLGELCEDTITYKCPFLKQNEPEDIDCWCNSTSTWVTYGTCTTTGEHRREKRSVALVPHVGMGLETRTETWMSSEGAWKHAQRIETWILRHPGFTIMAAILAYTIGTTHFQRALIFILLTAVAPSMTMRCIGISNRDFVEGVSGGSWVDIVLEHGSCVTTMAKNKPTLDFELIETEAKQPATLRKYCIEAKLTNTTTDSRCPTQGEPSLNEEQDKRFVCKHSMVDRGWGNGCGLFGKGGIVTCAMFTCKKNMKGKVVQPENLEYTIVITPHSGEEHAVGNDTGKHGKEIKITPQSSITEAELTGYGTVTMECSPRTGLDFNEMVLLQMENKAWLVHRQWFLDLPLPWLPGADTQGSNWIQKETLVTFKNPHAKKQDVVVLGSQEGAMHTALTGATEIQMSSGNLLFTGHLKCRLRMDKLQLKGMSYSMCTGKFKVVKEIAETQHGTIVIRVQYEGDGSPCKIPFEIMDLEKRHVLGRLITVNPIVTEKDSPVNIEAEPPFGDSYIIIGVEPGQLKLNWFKKGSSIGQMIETTMRGAKRMAILGDTAWDFGSLGGVFTSIGKALHQVFGAIYGAAFSGVSWIMKILIGVIITWIGMNSRSTSLSVSLVLVGVVTLYLGVMVQA

SEQ ID NO: 272 - protein, 685 aa, unidentified
  source 1..685: note = Dengue Virus
MLNILNRRRRTAGIIIMMIPTVMAFHLTTRNGEPHMIVSRQEKGKSLLFKTKDGTNMCTLMAMDLGELCEDTITYKCPFLKQNEPEDIDCWCNSTSTWVTYGTCTTTGEHRREKRSVALVPHVGMGLETRTETWMSSEGAWKHAQRIETWILRHPGFTIMAAILAYTIGTTHFQRVLIFILLTAIAPSMTMRCIGISNRDFVEGVSGGSWVDIVLEHGSCVTTMAKNKPTLDFELIKTEAKQPATLRKYCIEAKLTNTTTDSRCPTQGEPTLNEEQDKRFVCKHSMVDRGWGNGCGLFGKGGIVTCAMFTCKKNMEGKIVQPENLEYTVVITPHSGEEHAVGNDTGKHGKEVKITPQSSITEAELTGYGTVTMECSPRTGLDFNEMVLLQMKDKAWLVHRQWFLDLPLPWLPGADTQGSNWIQKETLVTFKNPHAKKQDVVVLGSQEGAMHTALTGATEIQMSSGNLLFTGHLKCRLRMDKLQLKGMSYSMCTGKFKVVKEIAETQHGTIVIRVQYEGDGSPCKTPFEIMDLEKRHVLGRLTTVNPIVTEKDSPVNIEAEPPFGDSYIIIGVEPGQLKLDWFKKGSSIGQMFETTMRGAKRMAILGDTAWDFGSLGGVFTSIGKALHQVFGAIYGAAFSGVSWTMKILIGVIITWIGMNSRSTSLSVSLVLVGIVTLYLGVMVQA

SEQ ID NO: 273 - protein, 685 aa, unidentified
  source 1..685: note = Dengue Virus
MLNILNRRRRTAGIIIMMIPTVMAFHLTTRNGEPHMIVSRQEKGKSLLFKTEVGVNMCTLMAMDLGELCEDTITYKCPLLRQNEPEDIDCWCNSTSTWVTYGTCTTMGEHRREKRSVALVPHVGMGLETRTETWMSSEGAWKHVQRIETWILRHPGFTMMAAILAYTIGTTHFQRALILILLTAVTPSMTMRCIGMSNRDFVEGVSGGSWVDIVLEHGSCVTTMAKNKPTLDFELIKTEAKQPATLRKYCIEAKLTNTTTESRCPTQGEPSLNEEQDKRFVCKHSMVDRGWGNGCGLFGKGGIVTCAMFRCKKNMEGKVVQPENLEYTIVITPHSGEEHAVGNDTGKHGKEIKITPQSSITEAELTGYGTITMECSPRTGLDFNEIVLLQMENKAWLVHRQWFLDLPLPWLPGADTQGSNWIQKETLVTFKNPHAKKQDVVVLGSQEGAMHTALTGATEIQMSSGNLLFTGHLKCRLRMDKLQLKGMSYSMCTGKFKVVKEIAETQHGTIVIRVQYEGDGSPCKIPFEIMDLEKRHVLGRLITVNPIVTEKDSPVNIEAEPPFGDSYIIIGVEPGQLKLNWFKKGSSIGQMFETTMRGAKRMAILGDTAWDFGSLGGVFTSIGKALHQVFGAIYGAAFSGVSWTMKILIGVIITWIGMNSRSTSLSVTLVLVGIVTLYLGVMVQA

SEQ ID NO: 274 - protein, 685 aa, unidentified
  source 1..685: note = Dengue Virus
MLNILNRRRRTAGIIIMMIPTVMAFHLTTRNGEPHMIVSRQEKGKSLLFKTKDGTNMCTLMAMDLGELCEDTITYKCPFLKQNEPEDIDCWCNSTSTWVTYGTCTTTGEHRREKRSVALVPHVGMGLETRTETWMSSEGAWKHAQRIETWILRHPGFTIMAAILAYTIGTTHFQRVLIFILLTAIAPSMTMRCIGISNRDFVEGVSGGSWVDIVLEHGSCVTTMAKNKPTLDFELIKTEAKQPATLRKYCIEAKLTNTTTDSRCPTQGEPTLNEEQDKRFVCKHSMVDRGWGNGCGLFGKGGIVTCAMFTCKKNMEGKIVQPENLEYTVVITPHSGEEHAVGNDTGKHGKEVKITPQSSITEAELTGYGTVTMECSPRTGLDFNEMVLLQMEDKAWLVHRQWFLDLPLPWLPGADTQGSNWIQKETLVTFKNPHAKKQDVVVLGSQEGAMHTALTGATEIQMSSGNLLFTGHLKCRLRMDKLQLKGMSYSMCTGKFKIVKEIAETQHGTIVIRVQYEGDGSPCKIPFEIMDLEKRHVLGRLITVNPIVTEKDSPVNIEAEPPFGDSYIIIGAEPGQLKLDWFKKGSSIGQMFETTMRGAKRMAILGDTAWDFGSLGGVFTSIGKALHQVFGAIYGAAFSGVSWTMKILIGVIITWIGMNSRSTSLSVSLVLVGIVTLYLGVMVQA

SEQ ID NO: 275 - protein, 685 aa, unidentified
  source 1..685: note = Dengue Virus
MLNILNRRRRTAGIIIMMIPTVMAFHLTTRNGEPHMIVSRQEKGKSLLFKTEDGVNMCTLMAMDLGELCEDTITYKCPLLRQNEPEDIDCWCNSTSTWVTYGTCTTTGEHRREKRSVALVPHVGMGLETRTETWMSSEGAWKHAQRIEIWILRHPGFTIMAAILAYTIGTTHFQRALIFILLTAVAPSMTMRCIGISNRDFVEGVSGGSWVDIVLEHGSCVTTMAKNKPTLDFELIKTEAKQPATLRKYCIEAKLTNTTTESRCPTQGEPSLNEEQDKRFVCKHSMVDRGWGNGCGLFGKGGIVTCAMFTCKKNMEGKVVQPENLEYTIVVTPHSGEEHAVGNDTGKHGKEIKVTPQSSITEAELTGYGTVTMECSPRTGLDFNEMVLLQMENKAWLVHRQWFLDLPLPWLPGADTQGSNWIQKETLVTFKNPHAKKQDVVVLGSQEGAMHTALTGATEIQMSSGNLLFTGHLKCRLRMDKLQLKGMSYSMCTGKFKVVKEIAETQHGTIVIRVQYEGDGSPCKIPFEIMDLEKRHVLGRLITVNPIVTEKDSPVNIEAEPPFGDSYIIIGVEPGQLKLNWFKKGSSIGQMFETTMRGAKRMAILGDTAWDFGSLGGVFTSIGKALHQVFGAIYGAAFSGVSWTMKILIGVIITWIGMNSRSTSLSVSLVLVGIVTLYLGVMVQA

SEQ ID NO: 276 - protein, 100 aa, unidentified
  source 1..100: note = Dengue Virus
MNNQRKKTGRPSFNMLKRARNRVSTVSQLAKRFSKGLLSGQGPMKLVMAFIAFLRFLAIPPTAGILARWGSFKKNGAIKVLRGFKKEISNMLNIMNRRKR

SEQ ID NO: 277 - protein, 100 aa, unidentified
  source 1..100: note = Dengue Virus
MNNQRKKTGKPSINMLKRVRNRVSTGSQLAKRFSKGLLNGQGPMKLVMAFIAFLRFLAIPPTAGVLARWGTFKKSGAIKVLKGFKKEISNMLSIINQRKK

SEQ ID NO: 278 - protein, 100 aa, unidentified
  source 1..100: note = Dengue Virus
MNNQRKKAKNTPFNMLKRERNRVSTVQQLTKRFSLGMLQGRGPLKLFMALVAFLRFLTIPPTAGILKRWGTIKKSKAINVLRGFRKEIGRMLNILNRRRR

SEQ ID NO: 279 - protein, 114 aa, unidentified
  source 1..114: note = Dengue Virus
MNNQRKKTGRPSFNMLKRARNRVSTVSQLAKRFSKGLLSGQGPMKLVMAFIAFLRFLAIPPTAGILARWGSFKKNGAIKVLRGFKKEISNMLNIMNRRKRSVTMLLMLLPTALA

SEQ ID NO: 280 - protein, 114 aa, unidentified
  source 1..114: note = Dengue Virus
MNNQRKKTGKPSINMLKRVRNRVSTGSQLAKRFSKGLLNGQGPMKLVMAFIAFLRFLAIPPTAGVLARWGTFKKSGAIKVLKGFKKEISNMLSIINQRKKTSLCLMMILPAALA

SEQ ID NO: 281 - protein, 114 aa, unidentified
  source 1..114: note = Dengue Virus
MNNQRKKAKNTPFNMLKRERNRVSTVQQLTKRFSLGMLQGRGPLKLFMALVAFLRFLTIPPTAGILKRWGTIKKSKAINVLRGFRKEIGRMLNILNRRRRSAGMIIMLIPTVMA

SEQ ID NO: 282 - protein, 113 aa, unidentified
  source 1..113: note = Dengue Virus
MNQRKKVVRPPFNMLKRERNRVSTPQGLVKRFSTGLFSGKGPLRMVLAFITFLRVLSIPPTAGILKRWGQLKKNKAIKILIGFRKEIGRMLNILNGRKRSTITLLCLIPTVMA

SEQ ID NO: 283 - protein, 99 aa, unidentified
  source 1..99: note = Dengue Virus
MNQRKKVVRPPFNMLKRERNRVSTPQGLVKRFSTGLFSGKGPLRMVLAFITFLRVLSIPPTAGILKRWGQLKKNKAIKILIGFRKEIGRMLNILNGRKR

SEQ ID NO: 284 - protein, 493 aa, unidentified
  source 1..493: note = Dengue Virus
MRCVGVGNRDFVEGLSGATWVDVVLEHGGCVTTMAKNKPTLDIELQKTEATQLATLRKLCIEGKITNITTDSRCPTQGEAVLPEEQDQNYVCKHTYVDRGWGNGCGLFGKGSLVTCAKFQCLEPIEGKVVQYENLKYTVIITVHTGDQHQVGNETQGVTAEITPQASTTEAILPEYGTLGLECSPRTGLDFNEMILLTMKNKAWMVHRQWFFDLPLPWASGATTETPTWNRKELLVTFKNAHAKKQEVVVLGSQEGAMHTALTGATEIQNSGGTSIFAGHLKCRLKMDKLELKGMSYAMCTNTFVLKKEVSETQHGTILIKVEYKGEDAPCKIPFSTEDGQGKAHNGRLITANPVVTKKEEPVNIEAEPPFGESNIVIGIGDNALKINWYKKGSSIGKMFEATERGARRMAILGDTAWDFGSVGGVLNSLGKMVHQIFGSAYTALFSGVSWVMKIGIGVLLTWIGLNSKNTSMSFSCIAIGIITLYLGAVVQA

SEQ ID NO: 285 - protein, 495 aa, unidentified
  source 1..495: note = Dengue Virus
MRCVGIGNRDFVEGLSGATWVDVVLEHGSCVTTMAKDKPTLDIELLKTEVTNPAVLRKLCIEAKISNTTTDSRCPTQGEATLVEEQDTNFVCRRTFVDRGWGNGCGLFGKGSLITCAKFKCVTKLEGKIVQYENLKYSVIVTVHTGDQHQVGNETTEHGTTATITPQAPTSEIQLTDYGALTLDCSPRTGLDFNEMVLLTMKKKSWLVHKQWFLDLPLPWTSGASTSQETWNRQDLLVTFKTAHAKKQEVVVLGSQEGAMHTALTGATEIQTSGTTTIFAGHLKCRLKMDKLILKGMSYVMCTGSFKLEKEVAETQHGTVLVQVKYEGTDAPCKIPFSSQDEKGVTQNGRLITANPIVTDKEKPVNIEAEPPFGESYIVVGAGEKALKLSWFKKGSSIGKMFEATARGARRMAILGDTAWDFGSIGGVFTSVGKLIHQIFGTAYGVLFSGVSWTMKIGIGILLTWLGLNSRSTSLSMTCIAVGMVTLYLGVMVQA

SEQ ID NO: 286 - protein, 495 aa, unidentified
  source 1..495: note = Dengue Virus
MRCIGMSNRDFVEGVSGGSWVDIVLEHGSCVTTMAKNKPTLDFELIKTEAKQPATLRKYCIEAKLTNTTTESRCPTQGEPSLNEEQDKRFVCKHSMVDRGWGNGCGLFGKGGIVTCAMFRCKKNMEGKVVQPENLEYTIVITPHSGEEHAVGNDTGKHGKEIKITPQSSITEAELTGYGTVTMECSPRTGLDFNEMVLLQMENKAWLVHRQWFLDLPLPWLPGADTQGSNWIQKETLVTFKNPHAKKQDVVVLGSQEGAMHTALTGATEIQMSSGNLLFTGHLKCRLRMDKLQLKGMSYSMCTGKFKVVKEIAETQHGTIVIRVQYEGDGSPCKIPFEIMDLEKRHVLGRLITVNPIVTEKDSPVNIEAEPPFGDSYIIIGVEPGQLKLNWFKKGSSIGQMFETTMRGAKRMAILGDTAWDFGSLGGVFTSIGKALHQVFGAIYGAAFSGVSWTMKILIGVIITWIGMNSRSTSLSVTLVLVGIVTLYLGVMVQA

SEQ ID NO: 287 - protein, 491 aa, unidentified
  source 1..491: note = Dengue Virus
MRCVGVGNRDFVEGVSGGAWVDLVLEHGGCVTTMAQGKPTLDFELTKTTAKEVALLRTYCIEASISNITTATRCPTQGEPYLKEEQDQQYICRRDVVDRGWGNGCGLFGKGGVVTCAKFSCSGKITGNLVRIENLEYTVVVTVHNGDTHAVGNDTSNHGVTAMITPRSPSVEVKLPDYGELTLDCEPRSGIDFNEMILMKMKKKTWLVHKQWFLDLPLPWTAGADTSEVHWNYKERMVTFKVPHAKRQDVTVLGSQEGAMHSALAGATEVDSGDGNHMFAGHLKCEVRMEKLRIKGMSYTMCSGKFSIDKEMAETQHGTTVVKVKYEGAGAPCKVPIEIRDVNKEKVVGRIISSTPLAENTNSVTNIELEPPFGDSYIVIGVGNSALTLHWFRKGSSIGKMFESTYRGAKRMAILGETAWDFGSVGGLFTSLGKAVHQVFGSVYTTMFGGVSWMIRILIGFLVLWIGTNSRNTSMAMTCIAVGGITLFLGF

SEQ ID NO: 288 - protein, 75 aa, unidentified
  source 1..75: note = Dengue Virus
SVALTPHSGMGLETRAETWMSSEGAWKHAQRVESWILRNPGFALLAGFMAYMIGQTGIQRTVFFVLMMLVAPSYG

SEQ ID NO: 289 - protein, 75 aa, unidentified
  source 1..75: note = Dengue Virus
SVALAPHVGMGLDTRTQTWMSAEGAWRQVEKVETWALRHPGFTILALFLAHYIGTSLTQKVVIFILLMLVTPSMT

SEQ ID NO: 290 - protein, 75 aa, unidentified
  source 1..75: note = Dengue Virus
SVALAPHVGLGLETRTETWMSSEGAWKQIQKVETWALRHPGFTVIALFLAHAIGTSITQKGIIFILLMLVTPSMA

SEQ ID NO: 291 - protein, 75 aa, unidentified
  source 1..75: note = Dengue Virus
SVALVPHVGMGLETRTETWMSSEGAWKHVQRIETWILRHPGFTMMAAILAYTIGTTHFQRALIFILLTAVTPSMT

SEQ ID NO: 292 - protein, 9 aa, synthetic construct
  REGION 1..9: note = Synthetic Polynucleotide
KTVWFVPSI

SEQ ID NO: 293 - protein, 9 aa, synthetic construct
  REGION 1..9: note = Synthetic Polynucleotide
TVWFVPSIK

SEQ ID NO: 294 - protein, 9 aa, synthetic construct
  REGION 1..9: note = Synthetic Polynucleotide
GQQRVFKEK

SEQ ID NO: 295 - protein, 9 aa, synthetic construct
  REGION 1..9: note = Synthetic Polynucleotide
CVYNMMGKR

SEQ ID NO: 296 - protein, 9 aa, synthetic construct
  REGION 1..9: note = Synthetic Polynucleotide
VYNMMGKRE

SEQ ID NO: 297 - protein, 9 aa, synthetic construct
  REGION 1..9: note = Synthetic Polynucleotide
YNMMGKREK

SEQ ID NO: 298 - protein, 9 aa, synthetic construct
  REGION 1..9: note = Synthetic Polynucleotide
NMMGKREKK

SEQ ID NO: 299 - protein, 9 aa, synthetic construct
  REGION 1..9: note = Synthetic Polynucleotide
GTYGLNTFT

SEQ ID NO: 300 - protein, 9 aa, synthetic construct
  REGION 1..9: note = Synthetic Polynucleotide
ISGDDCVVK

SEQ ID NO: 301 - protein, 9 aa, synthetic construct
  REGION 1..9: note = Synthetic Polynucleotide
LMCHATFTM

SEQ ID NO: 302 - protein, 9 aa, synthetic construct
  REGION 1..9: note = Synthetic Polynucleotide
CHATFTMRL

SEQ ID NO: 303 - protein, 9 aa, synthetic construct
  REGION 1..9: note = Synthetic Polynucleotide
GEAAAIFMT

SEQ ID NO: 304 - protein, 9 aa, synthetic construct
  REGION 1..9: note = Synthetic Polynucleotide
KTVWFVPSI

SEQ ID NO: 305 - protein, 9 aa, synthetic construct
  REGION 1..9: note = Synthetic Polynucleotide
HWTEAKMLL

SEQ ID NO: 306 - protein, 9 aa, synthetic construct
  REGION 1..9: note = Synthetic Polynucleotide
WTEAKMLLD

SEQ ID NO: 307 - protein, 9 aa, synthetic construct
  REGION 1..9: note = Synthetic Polynucleotide
LGCGRGGWS

SEQ ID NO: 308 - protein, 9 aa, synthetic construct
  REGION 1..9: note = Synthetic Polynucleotide
MAMTDTTPF

SEQ ID NO: 309 - protein, 9 aa, synthetic construct
  REGION 1..9: note = Synthetic Polynucleotide
MYADDTAGW

SEQ ID NO: 310 - protein, 9 aa, synthetic construct
  REGION 1..9: note = Synthetic Polynucleotide
VGTYGLNTF

SEQ ID NO: 311 - protein, 9 aa, synthetic construct
  REGION 1..9: note = Synthetic Polynucleotide
YFHRRDLRL

SEQ ID NO: 312 - protein, 9 aa, synthetic construct
  REGION 1..9: note = Synthetic Polynucleotide
FKPGTSGSP

SEQ ID NO: 313 - protein, 9 aa, synthetic construct
  REGION 1..9: note = Synthetic Polynucleotide
KPGTSGSPI

SEQ ID NO: 314 - protein, 9 aa, synthetic construct
  REGION 1..9: note = Synthetic Polynucleotide
IPERSWNSG

SEQ ID NO: 315 - protein, 9 aa, synthetic construct
  REGION 1..9: note = Synthetic Polynucleotide
PERVILAGP

SEQ ID NO: 316 - protein, 9 aa, synthetic construct
  REGION 1..9: note = Synthetic Polynucleotide
LMRRGDLPV

SEQ ID NO: 317 - protein, 9 aa, synthetic construct
  REGION 1..9: note = Synthetic Polynucleotide
PLSRNSTHE

SEQ ID NO: 318 - protein, 9 aa, synthetic construct
  REGION 1..9: note = Synthetic Polynucleotide
LSRNSTHEM

SEQ ID NO: 319 - protein, 9 aa, synthetic construct
  REGION 1..9: note = Synthetic Polynucleotide
SRNSTHEMY

SEQ ID NO: 320 - protein, 9 aa, synthetic construct
  REGION 1..9: note = Synthetic Polynucleotide
MAMTDTTPF

SEQ ID NO: 321 - protein, 9 aa, synthetic construct
  REGION 1..9: note = Synthetic Polynucleotide
TPFGQQRVF

SEQ ID NO: 322 - protein, 9 aa, synthetic construct
  REGION 1..9: note = Synthetic Polynucleotide
LMYFHRRDL

SEQ ID NO: 323 - protein, 9 aa, synthetic construct
  REGION 1..9: note = Synthetic Polynucleotide
LRTLILAPT

SEQ ID NO: 324 - protein, 9 aa, synthetic construct
  REGION 1..9: note = Synthetic Polynucleotide
LMCHATFTM

SEQ ID NO: 325 - protein, 9 aa, synthetic construct
  REGION 1..9: note = Synthetic Polynucleotide
ARGYISTRV

SEQ ID NO: 326 - protein, 9 aa, synthetic construct
  REGION 1..9: note = Synthetic Polynucleotide
RRGDLPVWL

SEQ ID NO: 327 - protein, 9 aa, synthetic construct
  REGION 1..9: note = Synthetic Polynucleotide
GQQRVFKEK

SEQ ID NO: 328 - protein, 9 aa, synthetic construct
  REGION 1..9: note = Synthetic Polynucleotide
SRAIWYMWL

SEQ ID NO: 329 - protein, 9 aa, synthetic construct
  REGION 1..9: note = Synthetic Polynucleotide
FKLTYQNKV

SEQ ID NO: 330 - protein, 9 aa, synthetic construct
  REGION 1..9: note = Synthetic Polynucleotide
FKPGTSGSP

SEQ ID NO: 331 - protein, 9 aa, synthetic construct
  REGION 1..9: note = Synthetic Polynucleotide
LAPTRVVAA

SEQ ID NO: 332 - protein, 9 aa, synthetic construct
  REGION 1..9: note = Synthetic Polynucleotide
LMCHATFTM

SEQ ID NO: 333 - protein, 9 aa, synthetic construct
  REGION 1..9: note = Synthetic Polynucleotide
CHATFTMRL

SEQ ID NO: 334 - protein, 9 aa, synthetic construct
  REGION 1..9: note = Synthetic Polynucleotide
HATFTMRLL

SEQ ID NO: 335 - protein, 9 aa, synthetic construct
  REGION 1..9: note = Synthetic Polynucleotide
ATFTMRLLS

SEQ ID NO: 336 - protein, 9 aa, synthetic construct
  REGION 1..9: note = Synthetic Polynucleotide
KTVWFVPSI

SEQ ID NO: 337 - protein, 9 aa, synthetic construct
  REGION 1..9: note = Synthetic Polynucleotide
LSRNSTHEM

SEQ ID NO: 338 - protein, 9 aa, synthetic construct
  REGION 1..9: note = Synthetic Polynucleotide
QQRVFKEKV

SEQ ID NO: 339 - protein, 9 aa, synthetic construct
  REGION 1..9: note = Synthetic Polynucleotide
YGLNTFTNM

SEQ ID NO: 340 - protein, 9 aa, synthetic construct
  REGION 1..9: note = Synthetic Polynucleotide
LMYFHRRDL

SEQ ID NO: 341 - protein, 9 aa, synthetic construct
  REGION 1..9: note = Synthetic Polynucleotide
KQWFLDLPL

SEQ ID NO: 342 - protein, 9 aa, synthetic construct
  REGION 1..9: note = Synthetic Polynucleotide
RQWFLDLPL

SEQ ID NO: 343 - protein, 9 aa, synthetic construct
  REGION 1..9: note = Synthetic Polynucleotide
RQWFFDLPL

SEQ ID NO: 344 - protein, 9 aa, synthetic construct
  REGION 1..9: note = Synthetic Polynucleotide
TALTGATEI

SEQ ID NO: 345 - protein, 167 aa, synthetic construct
  REGION 1..167: note = Synthetic Polynucleotide
MLESIINFEKLTEGGGGSGGGGSLESIINFEKLTEGGGGSGGGGSLESIINFEKLTEGGGGSGGGGSLESIINFEKLTEGGGGSGGGGSLESIINFEKLTEGGGGSGGGGSLESIINFEKLTEGGGGSGGGGSLESIINFEKLTEGGGGSGGGGSLESIINFEKLTE

SEQ ID NO: 346 - protein, 125 aa, synthetic construct
  REGION 1..125: note = Synthetic Polynucleotide
MLESIINFEKLTEGFLGLESIINFEKLTEGFLGLESIINFEKLTEGFLGLESIINFEKLTEGFLGLESIINFEKLTEGFLGLESIINFEKLTEGFLGLESIINFEKLTEGFLGLESIINFEKLTE

SEQ ID NO: 347 - protein, 177 aa, synthetic construct
  REGION 1..177: note = Synthetic Polynucleotide
MRVTAPRTVLLLLSAALALTETWALESIINFEKLTELESIINFEKLTELESIINFEKLTELESIINFEKLTELESIINFEKLTELESIINFEKLTELESIINFEKLTELESIINFEKLTEGSIVGIVAGLAVLAVVVIGAVVATVMCRRKSSGGKGGSYSQAASSDSAQGSDVSLTA

SEQ ID NO: 348 - protein, 205 aa, synthetic construct
  REGION 1..205: note = Synthetic Polynucleotide
MRVTAPRTVLLLLSAALALTETWALESIINFEKLTEGFLGLESIINFEKLTEGFLGLESIINFEKLTEGFLGLESIINFEKLTEGFLGLESIINFEKLTEGFLGLESIINFEKLTEGFLGLESIINFEKLTEGFLGLESIINFEKLTEGSIVGIVAGLAVLAVVVIGAVVATVMCRRKSSGGKGGSYSQAASSDSAQGSDVSLTA

SEQ ID NO: 349 - protein, 13 aa, synthetic construct
  REGION 1..13: note = Synthetic Polynucleotide
MSIINFEKLKDEL

SEQ ID NO: 350 - protein, 93 aa, synthetic construct
  REGION 1..93: note = Synthetic Polynucleotide
MRVTAPRTVLLLLSAALALTETWALESIINFEKLTEGSIVGIVAGLAVLAVVVIGAVVATVMCRRKSSGGKGGSYSQAASSDSAQGSDVSLTA

SEQ ID NO: 351 - protein, 113 aa, synthetic construct
  REGION 1..113: note = Synthetic Polynucleotide
METDTLLLWVLLLWVPGSTGDSIINFEKLGFLGSIINFEKLGFLGSIINFEKLGFLGSIINFEKLGFLGSIINFEKLGFLGSIINFEKLGFLGSIINFEKLGFLGSIINFEKL

SEQ ID NO: 352 - protein, 247 aa, synthetic construct
  REGION 1..247: note = Synthetic Polynucleotide
MRVTAPRTVLLLLSAALALTETWALESIINFEKLTEGGGGSGGGGSLESIINFEKLTEGGGGSGGGGSLESIINFEKLTEGGGGSGGGGSLESIINFEKLTEGGGGSGGGGSLESIINFEKLTEGGGGSGGGGSLESIINFEKLTEGGGGSGGGGSLESIINFEKLTEGGGGSGGGGSLESIINFEKLTEGSIVGIVAGLAVLAVVVIGAVVATVMCRRKSSGGKGGSYSQAASSDSAQGSDVSLTA

SEQ ID NO: 353 - protein, 97 aa, synthetic construct
  REGION 1..97: note = Synthetic Polynucleotide
MLESIINFEKLTELESIINFEKLTELESIINFEKLTELESIINFEKLTELESIINFEKLTELESIINFEKLTELESIINFEKLTELESIINFEKLTE

SEQ ID NO: 354 - protein, 9 aa, synthetic construct
  REGION 1..9: note = Synthetic Polynucleotide
MSIINFEKL

SEQ ID NO: 355 - protein, 134 aa, synthetic construct
  REGION 1..134: note = Synthetic Polynucleotide
METDTLLLWVLLLWVPGSTGDHPFTEDDAVDPNDSDIDPESRSIINFEKLGFLGSIINFEKLGFLGSIINFEKLGFLGSIINFEKLGFLGSIINFEKLGFLGSIINFEKLGFLGSIINFEKLGFLGSIINFEKL

SEQ ID NO: 356 - protein, 159 aa, synthetic construct
  REGION 1..159: note = Synthetic Polynucleotide
MSIINFEKLGFLGSIINFEKLGFLGSIINFEKLGFLGSIINFEKLGFLGSIINFEKLGFLGSIINFEKLGFLGSIINFEKLGFLGSIINFEKLPPPSTVSNMIIIEVLIVLGAVINIGAMVAFVLKSKRKIGGKGGVYALAGGSNSIHGSALFLEAFKA

SEQ ID NO: 357 - protein, 400 aa, synthetic construct
  REGION 1..400: note = Synthetic Polynucleotide
MRCVGIGNRDFVEGLSGATNVDVVLEHGSCVTTMAKDKPTLDIELLKTEVTNPAVLRKLCIEAKISNTTTDSRCPTQGEATLVEEQDANFVCRRTFVCRGAGNGCGLFGKGSLLTCAKFKCVTKLEGKIVQYENLKYSVIVTVHTGDQHQVGNETTEHGTIATITPQAPTSEIQLTDYGALTLDCSPRTGLDFNFMVLLTMKEKSWLVHKQWFLDLPLPWTSGASTSQETWNRQDLLVTFKTAHAKKQEAVVLGSQEGAMHTALTGATEIQTSGTTTIFAGHLKCRLKMDKLTLKGISYVMCTGSFKLEKEVAETQHGTVLVQVKYEGTDAPCKIPFSSQDEKGVTQNGRLVTANPIVTDKEKPVNIEAEPPFGESYIVVGAGEKALKLSWFKKGSSIGK

SEQ ID NO: 358 - protein, 394 aa, synthetic construct
  REGION 1..394: note = Synthetic Polynucleotide
MRCIGISNRDFVEGVSGGSNVDIVLEHGSCVTTMAKNKPTLDFELIKTEAKQPATLRKYCIEAKLTNTTTESRCPTQGEPTLNEEQDKRFVCKHSMVDRGWGNGCGLFGKGGIVTCAMFTCKKNMEGKIVQPENLEYTVVITPHSGEEHAVGNDTGKHGKEVKITPQSSITEAELTGYGTVTMECSPRTGLDFNFMVLLQMKDKAWLVHRQWFLDLPLPWLPGADTQGSNWIQKETLVTFKNPHAKKQDVVVLGSQEGAMHTALTGATEIQMSSGNLLFTGHLKCALRMDKLQLKGMSYSMCTGKFKVVKEIAETQHGTIVIRVQYEGDGSPCKIPFEIMDLEKRHVLGRLITVNPIVTEKDSPVNIEAEPPFGDSYIIIGVEPDQLKLNWFKK

SEQ ID NO: 359 - protein, 392 aa, synthetic construct
  REGION 1..392: note = Synthetic Polynucleotide
MRCVGVGNRDFVEGLSGATWVDVVLEHGGCVTTMAKNKPTLDIELQKTEATQLATLRKLCIEGKITNITTDSRCPTQGEAILPEEQDQNYVCKHTYVDRGWGNGCGLFGKGSLVTCAKFQCLESIEGKIVQHENLKYTVIITVHTGDQHQVGNETQGVTAEITSQASTAEAILPEYGTLGLECSPRTGLDFNEMILLTMKDKAWMVHRQWFFDLPLPWTSGATTKTPTWNRKELLVTFKNAHAKKQEVVVLGSQEGAMHTALTGATEIQTSGGTSIFAGHLKCRLKMDKLKLKGMSYAMCLNTFVLKKEVSETQHGTILIKVEYKGEDAPCKIPFSTEDGQGKAHNGRLITANPVVTKKEEPVNIEAEPPFGESNIVIGIGDKALKINWYRK

SEQ ID NO: 360 - protein, 400 aa, synthetic construct
  REGION 1..400: note = Synthetic Polynucleotide
MRCVGVGNRDFVEGVSGGAWVDLVLEHGGCVTTMAQGKPTLDFELTKTTAKEVALLRTYCIEASISNITTATRCPTQGEPYLKEEQDQQYICRRDVVDRGWGNGCGLFGKGGVVTCAKFSCSGKITGNLVQIENLEYTVVVTVHNGDTHAVGNDTSNHGVTAMITPRSPSVEVKLPDYGELTLDCEPRSGIDFNEMILMKMKKKTWLVHKQWFLDLPLPWTAGADTSEVHWNYKERMVTFKVPHAKRQDVTVLGSQEGAMHSALAGATEVDSGDGNHMFAGHLKCKVRMEKLRIKGMSYTMCSGKFSIDKEMAETQHGTTVVKVKYEGAGAPCKVPIEIRDVNKEKVVGRIISSTPLAENTNSVTNIELEPPFGDSYIVIGVGNSALTLHWFRKGSSIGK

SEQ ID NO: 361 - protein, 140 aa, synthetic construct
  REGION 1..140: note = Synthetic Polynucleotide
GKPIPNPLLGLDSTGFLGGKPIPNPLLGLDSTGFLGGKPIPNPLLGLDSTGFLGGKPIPNPLLGLDSTGFLGGKPIPNPLLGLDSTGFLGGKPIPNPLLGLDSTGFLGGKPIPNPLLGLDSTGFLGGKPIPNPLLGLDST

SEQ ID NO: 362 - protein, 140 aa, synthetic construct; identical to SEQ ID NO: 361
  REGION 1..140: note = Synthetic Polynucleotide

SEQ ID NO: 363 - protein, 8 aa, synthetic construct
  REGION 1..8: note = Synthetic Polynucleotide
TALGATEI

SEQ ID NO: 364 - protein, 8 aa, synthetic construct
  REGION 1..8: note = Synthetic Polynucleotide
SIINFEKL

SEQ ID NO: 365 - protein, 9 aa, unidentified
  VARIANT 2: note = misc_feature - Xaa can be Ala or Ser or Thr
  VARIANT 4: note = misc_feature - Xaa can be Leu or Met
  VARIANT 7: note = misc_feature - Xaa can be Lys or Arg
  source 1..9: note = Dengue Virus
KXWXVHXQW

SEQ ID NO: 366 - protein, 9 aa, unidentified
  VARIANT 3: note = misc_feature - Xaa can be Thr or Ser or Val or Ser
  VARIANT 6: note = misc_feature - Xaa can be Leu or Thr or Ser
  VARIANT 7: note = misc_feature - Xaa can be Asn or Gly
  VARIANT 8: note = misc_feature - Xaa can be Lys or Ser or Thr
  source 1..9: note = Dengue Virus
SYXMCXXXF

SEQ ID NO: 367 - protein, 9 aa, unidentified
  VARIANT 5: note = misc_feature - Xaa can be Asn or Thr or Val
  VARIANT 6: note = misc_feature - Xaa can be Ala or Pro
  source 1..9: note = Dengue Virus
VTFKXXHAK

SEQ ID NO: 368 - protein, 9 aa, unidentified
  VARIANT 1: note = misc_feature - Xaa can be Lys or Arg
  VARIANT 5: note = misc_feature - Xaa can be Leu or Phe
  source 1..9: note = Dengue Virus
XQWFXDLPL

SEQ ID NO: 369 - skipped

SEQ ID NO: 370 - protein, 9 aa, unidentified
  source 1..9: note = Dengue Virus
GWGNGCGLF

SEQ ID NO: 371 - protein, 15 aa, unidentified
  VARIANT 1: note = misc_feature - Xaa can be Asp or Glu
  VARIANT 3: note = misc_feature - Xaa can be Asn or Tyr
  VARIANT 5..6: note = misc_feature - Xaa can be Ile or Val
  VARIANT 8: note = misc_feature - Xaa can be Val or Ile or Ala
  VARIANT 9: note = misc_feature - Xaa can be Glu or Gly
  VARIANT 10: note = misc_feature - Xaa can be Pro or Asn or Glu or Asp
  VARIANT 11: note = misc_feature - Xaa can be Gly or Lys or Ser
  VARIANT 12: note = misc_feature - Xaa can be Gln or Ala
  VARIANT 14: note = misc_feature - Xaa can be Thr or Lys
  VARIANT 15: note = misc_feature - Xaa can be Ile or Leu
  source 1..15: note = Dengue Virus
XSXIXXGXXXXXLXX

SEQ ID NO: 372 - protein, 15 aa, unidentified
  VARIANT 4: note = misc_feature - Xaa can be Val or Ile
  VARIANT 6: note = misc_feature - Xaa can be Leu or Met
  VARIANT 7: note = misc_feature - Xaa can be Gln or Thr or Lys
  VARIANT 10: note = misc_feature - Xaa can be Asp or Glu or Lys
  VARIANT 12: note = misc_feature - Xaa can be Ala or Ser or Thr
  VARIANT 14: note = misc_feature - Xaa can be Met or Leu
  source 1..15: note = Dengue Virus
NEMXLXXMKXKXWXV

SEQ ID NO: 373 - protein, 15 aa, unidentified
  VARIANT 2: note = misc_feature - Xaa can be Leu or Met
  VARIANT 5: note = misc_feature - Xaa can be Arg or Lys
  VARIANT 9: note = misc_feature - Xaa can be Phe or Leu
  source 1..15: note = Dengue Virus
WXVHXQWFXDLPLPW

SEQ ID NO: 374 - protein, 15 aa, unidentified
  VARIANT 1: note = misc_feature - Xaa can be Asn or Ile
  VARIANT 2: note = misc_feature - Xaa can be Gln or Arg or Tyr
  VARIANT 3: note = misc_feature - Xaa can be Lys or Gln
  VARIANT 4: note = misc_feature - Xaa can be Glu or Asp
  VARIANT 5: note = misc_feature - Xaa can be Thr or Leu or Arg
  VARIANT 6: note = misc_feature - Xaa can be Met or Leu
  VARIANT 11: note = misc_feature - Xaa can be Glu or Thr or Val
  VARIANT 12: note = misc_feature - Xaa can be Pro or Ala
  source 1..15: note = Dengue Virus
XXXXXXVTFKXXHAK

SEQ ID NO: 375 - protein, 15 aa, unidentified
  VARIANT 3: note = misc_feature - Xaa can be Lys or Arg
  VARIANT 4: note = misc_feature - Xaa can be Val or Leu
  VARIANT 5: note = misc_feature - Xaa can be Arg or Lys
  VARIANT 7: note = misc_feature - Xaa can be Glu or Asp
  VARIANT 10: note = misc_feature - Xaa can be Gln or Lys or Thr or Arg
  VARIANT 11: note = misc_feature - Xaa can be Ile or Leu
  VARIANT 14: note = misc_feature - Xaa can be Met or Ile
  source 1..15: note = Dengue Virus
KCXXXMXKLXXKGXS

SEQ ID NO: 376 - DNA, 1537 bp, unidentified
  source 1..1537: mol_type = genomic DNA; note = Chikungunya Virus
tcaagcttttggaccctcgtacagaagctaatacgactcactatagggaaataagagagaaaagaagagtaagaagaaatataagagccaccatggagacacctgcacagctgttgtttctgctgctgctttggttgcccgataccaccggtgactacaaagacgacgacgataaatacgagcacgtgacggtaataccaaacactgtgggggtgccatacaagaccctggtaaatcgcccaggctactctcccatggtgctggagatggagctccagtctgtgaccttagagccaaccctctcactcgactatatcacctgtgaatacaaaacagtgatcccatccccctacgtgaaatgttgcggaactgcagagtgtaaggataagagtctgcccgattacagctgcaaggtgtttacaggcgtgtatccatttatgtggggaggagcctactgtttttgcgatgccgaaaatactcagctgtctgaagcccatgtggagaagagtgaaagttgcaagaccgaatttgctagtgcctacagggcacacaccgcttctgcctccgctaaactccgagtcctttaccagggcaataatattacggtcgctgcctacgctaacggggaccacgctgtgacagtcaaggacgccaaattcgtagtgggcccaatgagctccgcctggactcccttcgacaacaaaatcgtcgtgtataaaggcgacgtgtacaatatggactacccacccttcggggctggaagaccgggccagtttggagatatccaatcaaggacacccgagtcaaaggacgtgtacgccaatacgcagctggtgctgcagagacccgccgctggtaccgtgcatgtgccttattcccaagctccatctggcttcaagtactggttgaaagagcgcggtgcttcgctgcagcatacagcaccgttcggatgtcagatagcaaccaaccctgtacgggctgtcaactgtgccgtgggaaatatacctatttccatcgacattccggacgcagctttcacacgtgtcgttgatgccccctcagtgactgacatgtcatgtgaggtgcctgcttgcacccacagcagcgattttggcggagtggccataatcaagtacaccgcctccaaaaaaggaaagtgtgccgtacactctatgaccaacgccgtcacaatcagagaagccgacgttgaagtagagggaaattcacagctgcaaatcagcttcagcaccgctcttgcctctgctgagtttagggttcaggtttgcagtactcaggtgcactgtgcagccgcttgccatccccccaaggatcatatcgtgaattatcctgcatcccacaccacactgggagtccaggatatctcaacaactgcaatgtcttgggtgcagaagatcacctgataataggctggagcctcggtggccatgcttcttgccccttgggcctccccccagcccctcctccccttcctgcacccgtacccccgtggtctttgaataaagtctgagtgggcggc

SEQ ID NO: 377 - DNA, 1531 bp, unidentified
  source 1..1531: mol_type = genomic DNA; note = Chikungunya Virus
tcaagcttttggaccctcgtacagaagctaatacgactcactatagggaaataagagagaaaagaagagtaagaagaaatataagagccaccatgtacgaacacgtaacagtgatcccgaacacggtgggagtaccgtataagactctagtcaacagaccgggctacagccccatggtattggagatggagcttctgtctgtcaccttggaaccaacgctatcgcttgattacatcacgtgcgagtataaaaccgttatcccgtctccgtacgtgaaatgctgcggtacagcagagtgtaaggacaagagcctacctgattacagctgtaaggtcttcaccggcgtctacccattcatgtggggcggcgcctactgcttctgcgacaccgaaaatacgcaattgagcgaagcacatgtggagaagtccgaatcatgcaaaacagaatttgcatcagcatacagggctcataccgcatccgcatcagctaagctccgcgtcctttaccaaggaaataatatcactgtggctgcttatgcaaacggcgaccatgccgtcacagttaaggacgctaaattcatagtggggccaatgtcttcagcctggacacctttcgacaataaaatcgtggtgtacaaaggcgacgtctacaacatggactacccgcccttcggcgcaggaagaccaggacaatttggcgacatccaaagtcgcacgcctgagagcgaagacgtctatgctaatacacaactggtactgcagagaccgtccgcgggtacggtgcacgtgccgtactctcaggcaccatctggcttcaagtattggctaaaagaacgaggggcgtcgctgcagcacacagcaccatttggctgtcaaatagcaacaaacccggtaagagcgatgaactgcgccgtagggaacatgcctatctccatcgacataccggacgcggcctttaccagggtcgtcgacgcgccatctttaacggacatgtcgtgtgaggtatcagcctgcacccattcctcagactttgggggcgtagccatcattaaatatgcagccagtaagaaaggcaagtgtgcagtgcactcgatgactaacgccgtcactattcgggaagctgaaatagaagtagaagggaactctcagttgcaaatctctttttcgacggccctagccagcgccgaatttcgcgtacaagtctgttctacacaagtacactgtgcagccgagtgccatccaccgaaagaccatatagtcaattacccggcgtcacacaccaccctcggggtccaagacatttccgctacggcgatgtcatgggtgcagaagatcacgggaggtgtgggactggttgtcgctgttgcagcactgatcctaatcgtggtgctatgcgtgtcgtttagcaggcactgataataggctggagcctcggtggccatgcttcttgccccttgggcctccccccagcccctcctccccttcctgcacccgtacccccgtggtctttgaataaagtctgagtgggcggc

SEQ ID NO: 378 - DNA, 1690 bp, unidentified
  source 1..1690: mol_type = genomic DNA; note = Chikungunya Virus
tcaagcttttggaccctcgtacagaagctaatacgactcactatagggaaataagagagaaaagaagagtaagaagaaatataagagccaccatgctatggaacgaacagcagcccctgttctggttgcaggctcttatcccgctggccgccttgatcgtcctgtgcaactgtctgaaactcttgccatgctgctgtaagaccctggcttttttagccgtaatgagcatcggtgcccacactgtgagcgcgtacgaacacgtaacagtgatcccgaacacggtgggagtaccgtataagactcttgtcaacagaccgggttacagccccatggtgttggagatggagctacaatcagtcaccttggaaccaacactgtcacttgactacatcacgtgcgagtacaaaactgtcatcccctccccgtacgtgaagtgctgtggtacagcagagtgcaaggacaagagcctaccagactacagctgcaaggtctttactggagtctacccatttatgtggggcggcgcctactgcttttgcgacgccgaaaatacgcaattgagcgaggcacatgtagagaaatctgaatcttgcaaaacagagtttgcatcggcctacagagcccacaccgcatcggcgtcggcgaagctccgcgtcctttaccaaggaaacaacattaccgtagctgcctacgctaacggtgaccatgccgtcacagtaaaggacgccaagtttgtcgtgggcccaatgtcctccgcctggacaccttttgacaacaaaatcgtggtgtacaaaggcgacgtctacaacatggactacccaccttttggcgcaggaagaccaggacaatttggtgacattcaaagtcgtacaccggaaagtaaagacgtttatgccaacactcagttggtactacagaggccagcagcaggcacggtacatgtaccatactctcaggcaccatctggcttcaagtattggctgaaggaacgaggagcatcgctacagcacacggcaccgttcggttgccagattgcgacaaacccggtaagagctgtaaattgcgctgtggggaacataccaatttccatcgacataccggatgcggcctttactagggttgtcgatgcaccctctgtaacggacatgtcatgcgaagtaccagcctgcactcactcctccgactttgggggcgtcgccatcatcaaatacacagctagcaagaaaggtaaatgtgcagtacattcgatgaccaacgccgttaccattcgagaagccgacgtagaagtagaggggaactcccagctgcaaatatccttctcaacagccctggcaagcgccgagtttcgcgtgcaagtgtgctccacacaagtacactgcgcagccgcatgccaccctccaaaggaccacatagtcaattacccagcatcacacaccacccttggggtccaggatatatccacaacggcaatgtcttgggtgcagaagattacgggaggagtaggattaattgttgctgttgctgccttaattttaattgtggtgctatgcgtgtcgtttagcaggcactaatgataataggctggagcctcggtggccatgcttcttgccccttgggcctccccccagcccctcctccccttcctgcacccgtacccccgtggtctttgaataaagtctgagtgggcggc

SEQ ID NO: 379 - DNA, 1531 bp, unidentified
  source 1..1531: mol_type = genomic DNA; note = Chikungunya Virus
tcaagcttttggaccctcgtacagaagctaatacgactcactatagggaaataagagagaaaagaagagtaagaagaaatataagagccaccatgtacgaacacgtaacagtgatcccgaacacggtgggagtaccgtataagactctagtcaatagaccgggctacagtcccatggtattggagatggaactactgtcagtcactttggagccaacgctatcgcttgattacatcacgtgcgagtacaaaaccgttatcccgtctccgtacgtgaaatgctgcggtacagcagagtgcaaggacaaaaacctacctgactacagctgtaaggtcttcaccggcgtctacccatttatgtggggcggagcctactgcttctgcgacgctgaaaacacgcaattgagcgaagcacacgtggagaagtccgaatcatgcaaaacagaatttgcatcagcatacagggctcataccgcatccgcatcagctaagctccgcgtcctttaccaaggaaataacatcactgtaactgcctatgctaacggcgaccatgccgtcacagttaaggacgccaaattcattgtggggccaatgtcttcagcctggacacctttcgacaacaaaattgtggtgtacaaaggtgacgtctataacatggactacccgccctttggcgcaggaagaccaggacaatttggcgatatccaaagtcgcacacctgagagtaaagacgtctatgctaatacacaactggtactgcagagaccggctgcgggtacggtacatgtgccatactctcaggcaccatctggctttaagtattggctaaaagaacgaggggcgtcgctgcagcacacagcaccatttggctgccaaatagcaacaaacccggtaagagcggtgaattgcgccgtagggaacatgcccatctccatcgacataccggatgcggccttcattagggtcgtcgacgcgccctctttaacggacatgtcgtgcgaggtaccagcctgcacccattcctcagatttcgggggcgtcgccattattaaatatgcagccagcaagaaaggcaagtgtgcggtgcattcgatgaccaacgccgtcacaattcgggaagctgagatagaagttgaagggaattctcagctgcaaatctctttctcgacggccttggccagcgccgaattccgcgtacaagtctgttctacacaagtacactgtgtagccgagtgccaccctccgaaggaccacatagtcaattacccggcgtcacataccaccctcggggtccaggacatttccgctacggcgctgtcatgggtgcagaagatcacgggaggcgtgggactggttgtcgctgttgcagcactgattctaatcgtggtgctatgcgtgtcgttcagcaggcactgataataggctggagcctcggtggccatgcttcttgccccttgggcctccccccagcccctcctccccttcctgcacccgtacccccgtggtctttgaataaagtctgagtgggcggc

SEQ ID NO: 380 - DNA, 1340 bp, unidentified
  source 1..1340: mol_type = genomic DNA; note = Chikungunya Virus
atggagaccccagctcagcttctgtttcttctccttctatggctgcctgacacgactggacatcaccaccatcatcatagtacaaaagacaatttcaatgtgtacaaggccacccgcccttatttagcacactgtccagattgcggtgaggggcactcctgtcactctcctatcgccttggagcggatccggaatgaggcgaccgatggaacactgaaaatccaggtaagcttgcagattggcatcaagactgacgatagccatgattggaccaaactacggtatatggatagccatacacctgccgatgctgaacgggccggtctgcttgtgagaactagcgctccatgcaccatcacggggacaatgggacattttatcctggctagatgcccaaagggcgaaaccctcaccgtcggattcaccgactcaaggaaaatttctcacacatgtacccatcccttccaccatgagccaccggtgatcgggcgcgaacgcttccacagcaggcctcagcatggaaaagaactgccatgctcgacctatgtacagtccaccgccgctaccgccgaagagatcgaagtgcatatgcctcccgacacacccgaccgaaccctaatgacacaacaatctgggaatgtgaagattacagtcaatggacagactgtgaggtataagtgtaactgcggtggctcaaatgagggcctcaccacaacggataaggtgatcaataactgcaaaattgaccagtgtcacgcggccgtgaccaaccataagaactggcagtacaactcacccttagtgcctaggaacgctgagctgggagatcgcaaggggaagatacacattcccttcccgttggcgaatgtgacctgccgtgtgccaaaagcgagaaatcctaccgtaacatatggcaaaaatcaggtgaccatgttgctctacccggatcacccaactctgctgagctatcggaatatgggacaagaacccaattaccacgaggaatgggttacgcacaagaaagaggtgacccttacagtccctactgaaggtctggaagtgacctggggcaataacgagccttataagtactggccccagatgagtacaaacggcaccgcccatggacatccacacgagatcattctgtattactacgaactatatcccacaatgactggcaagcctataccaaacccacttctcggccttgatagcacatgataataggctggagcctcggtggccatgcttcttgccccttgggcctccccccagcccctcctccccttcctgcacccgtacccccgtggtctttgaataaagtctgagtgggcggc

SEQ ID NO: 381 - DNA, 1483 bp, unidentified
  source 1..1483: mol_type = genomic DNA; note = Chikungunya Virus
tcaagcttttggaccctcgtacagaagctaatacgactcactatagggaaataagagagaaaagaagagtaagaagaaatataagagccaccatgagtaccaaggacaacttcaatgtctataaagccacaagaccgtacttagctcactgtcccgactgtggagaagggcactcgtgccatagtcccgtagcattagaacgcatcagaaatgaagcgacagacgggacgctgaaaatccaggtctccttgcaaatcggaataaagacggatgatagccacgattggaccaagctgcgttacatggacaaccacacgccagcggacgcagagagggcggggctatttgtaagaacatcagcaccgtgcacgattactggaacaatgggacacttcatcctgacccgatgtccgaaaggggaaactctgacggtgggattcactgacagtaggaagatcagtcactcatgtacgcacccatttcaccacgaccctcctgtgataggccgggagaaattccattcccgaccgcagcacggtaaagagctgccttgcagcacgtacgtgcagagcaccgccgcaactaccgaggagatagaggtacacatgcccccagacacccctgatcgcacattgatgtcacaacagtccggcaacgtaaagatcacagttaatggccagacggtgcggtacaagtgtaattgcggtggctcaaatgaaggactaataactacagacaaagtgattaataactgcaaagttgatcaatgtcatgccgcggtcaccaatcacaaaaagtggcagtacaactcccctctggtcccgcgtaatgctgaacttggggaccgaaaaggaaaaatccacatcccgtttccgctggcaaatgtaacatgcagggtgcctaaagcaaggaaccccaccgtgacgtacgggaaaaaccaagtcatcatgctactgtatcccgaccacccaacactcctgtcctaccggaacatgggagaagaaccaaactaccaagaagagtgggtgacgcataagaaggaagtcgtgctaaccgtgccgactgaagggctcgaggtcacgtggggtaacaacgagccgtataagtattggccgcagttatctacaaacggtacagcccatggccacccgcatgagataattctgtattattatgagctgtaccctactatgactgtagtagttgtgtcagtggcctcgttcgtactcctgtcgatggtgggtgtggcagtggggatgtgcatgtgtgcacgacgcagatgcatcacaccgtacgaactgacaccaggagctaccgtccctttcctgcttagcctaatatgctgcatcagaacagctaaagcgtgataataggctggagcctcggtggccatgcttcttgccccttgggcctccccccagcccctcctccccttcctgcacccgtacccccgtggtctttgaataaagtctgagtgggcggc

SEQ ID NO: 382 - DNA, 1483 bp, unidentified
  source 1..1483: mol_type = genomic DNA; note = Chikungunya Virus
tcaagcttttggaccctcgtacagaagctaatacgactcactatagggaaataagagagaaaagaagagtaagaagaaatataagagccaccatgagtattaaggaccacttcaatgtctataaagccacaagaccgtacctagctcactgtcccgactgtggagaagggcactcgtgccatagtcccgtagcgctagaacgcatcagaaacgaagcgacagacgggacgttgaaaatccaggtttccttgcaaatcggaataaagacggatgatagccatgattggaccaagctgcgttatatggacaatcacatgccagcagacgcagagcgggccgggctatttgtaagaacgtcagcaccgtgcacgattactggaacaatgggacacttcattctggcccgatgtccgaaaggagaaactctgacggtggggttcactgacggtaggaagatcagtcactcatgtacgcacccatttcaccatgaccctcctgtgataggccgggaaaaattccattcccgaccgcagcacggtagggaactaccttgcagcacgtacgcgcagagcaccgctgcaactgccgaggagatagaggtacacatgcccccagacaccccagatcgcacattaatgtcacaacagtccggcaatgtaaagatcacagtcaatagtcagacggtgcggtacaagtgcaattgtggtgactcaagtgaaggattaaccactacagataaagtgattaataactgcaaggtcgatcaatgccatgccgcggtcaccaatcacaaaaaatggcagtataactcccctctggtcccgcgtaatgctgaattcggggaccggaaaggaaaagttcacattccatttcctctggcaaatgtgacatgcagggtgcctaaagcaagaaaccccaccgtgacgtacggaaaaaaccaagtcatcatgttgctgtatcctgaccacccaacgctcctgtcctacaggaatatgggagaagaaccaaactatcaagaagagtgggtgacgcataagaaggagatcaggttaaccgtgccgactgaggggctcgaggtcacgtggggtaacaatgagccgtacaagtattggccgcagttatccacaaacggtacagcccacggccacccgcatgagataattctgtattattatgagctgtacccaactatgactgcggtagttttgtcagtggcctcgttcatactcctgtcgatggtgggtgtggcagtggggatgtgcatgtgtgcacgacgcagatgcattacaccgtacgaactgacaccaggagctaccgtccctttcctgcttagcctaatatgctgcattagaacagctaaagcgtgataataggctggagcctcggtggccatgcttcttgccccttgggcctccccccagcccctcctccccttcctgcacccgtacccccgtggtctttgaataaagtctgagtgggcggc

SEQ ID NO: 383 - DNA, 1426 bp, unidentified
  source 1..1426: mol_type = genomic DNA; note = Chikungunya Virus
tcaagcttttggaccctcgtacagaagctaatacgactcactatagggaaataagagagaaaagaagagtaagaagaaatataagagccaccatgccatatctagctcattgtcctgactgcggagaagggcattcgtgccacagccctatcgcattggagcgcatcagaaatgaagcaacggacggaacgctgaaaatccaggtctctttgcagatcgggataaagacagatgacagccacgattggaccaagctgcgctatatggatagccatacgccagcggacgcggagcgagccggattgcttgtaaggacttcagcaccgtgcacgatcaccgggaccatgggacactttattctcgcccgatgcccgaaaggagagacgctgacagtgggatttacggacagcagaaagatcagccacacatgcacacacccgttccatcatgaaccacctgtgataggtagggagaggttccactctcgaccacaacatggtaaagagttaccttgcagcacgtacgtgcagagcaccgctgccactgctgaggagatagaggtgcatatgcccccagatactcctgaccgcacgctgatgacgcagcagtctggcaacgtgaagatcacagttaatgggcagacggtgcggtacaagtgcaactgcggtggctcaaacgagggactgacaaccacagacaaagtgatcaataactgcaaaattgatcagtgccatgctgcagtcactaatcacaagaattggcaatacaactcccctttagtcccgcgcaacgctgaactcggggaccgtaaaggaaagatccacatcccattcccattggcaaacgtgacttgcagagtgccaaaagcaagaaaccctacagtaacttacggaaaaaaccaagtcaccatgctgctgtatcctgaccatccgacactcttgtcttaccgtaacatgggacaggaaccaaattaccacgaggagtgggtgacacacaagaaggaggttaccttgaccgtgcctactgagggtctggaggtcacttggggcaacaacgaaccatacaagtactggccgcagatgtctacgaacggtactgctcatggtcacccacatgagataatcttgtactattatgagctgtaccccactatgactgtagtcattgtgtcggtggcctcgttcgtgcttctgtcgatggtgggcacagcagtgggaatgtgtgtgtgcgcacggcgcagatgcattacaccatatgaattaacaccaggagccactgttcccttcctgctcagcctgctatgctgctgataataggctggagcctcggtggccatgcttcttgccccttgggcctccccccagcccctcctccccttcctgcacccgtacccccgtggtctttgaataaagtctgagtgggcggc

SEQ ID NO: 384 - DNA, 2800 bp, unidentified
  source 1..2800: mol_type = genomic DNA; note = Chikungunya Virus
tcaagcttttggaccctcgtacagaagctaatacgactcactatagggaaataagagagaaaagaagagtaagaagaaatataagagccaccatgagtaccaaggacaacttcaatgtctataaagccacaagaccgtacttagctcactgtcccgactgtggagaagggcactcgtgccatagtcccgtagcattagaacgcatcagaaatgaagcgacagacgggacgctgaaaatccaggtctccttgcaaatcggaataaagacggatgatagccacgattggaccaagctgcgttacatggacaaccacacgccagcggacgcagagagggcggggctatttgtaagaacatcagcaccgtgcacgattactggaacaatgggacacttcatcctgacccgatgtccgaaaggggaaactctgacggtgggattcactgacagtaggaagatcagtcactcatgtacgcacccatttcaccacgaccctcctgtgataggccgggagaaattccattcccgaccgcagcacggtaaagagctgccttgcagcacgtacgtgcagagcaccgccgcaactaccgaggagatagaggtacacatgcccccagacacccctgatcgcacattgatgtcacaacagtccggcaacgtaaagatcacagttaatggccagacggtgcggtacaagtgtaattgcggtggctcaaatgaaggactaataactacagacaaagtgattaataactgcaaagttgatcaatgtcatgccgcggtcaccaatcacaaaaagtggcagtacaactcccctctggtcccgcgtaatgctgaacttggggaccgaaaaggaaaaatccacatcccgtttccgctggcaaatgtaacatgcagggtgcctaaagcaaggaaccccaccgtgacgtacgggaaaaaccaagtcatcatgctactgtatcccgaccacccaacactcctgtcctaccggaacatgggagaagaaccaaactaccaagaagagtgggtgacgcataagaaggaagtcgtgctaaccgtgccgactgaagggctcgaggtcacgtggggtaacaacgagccgtataagtattggccgcagttatctacaaacggtacagcccatggccacccgcatgagataattctgtattattatgagctgtaccctactatgactgtagtagttgtgtcagtggcctcgttcgtactcctgtcgatggtgggtgtggcagtggggatgtgcatgtgtgcacgacgcagatgcatcacaccgtacgaactgacaccaggagctaccgtccctttcctgcttagcctaatatgctgcatcagaacagctaaagcgtacgaacacgtaacagtgatcccgaacacggtgggagtaccgtataagactctagtcaatagaccgggctacagtcccatggtattggagatggaactactgtcagtcactttggagccaacgctatcgcttgattacatcacgtgcgagtacaaaaccgttatcccgtctccgtacgtgaaatgctgcggtacagcagagtgcaaggacaaaaacctacctgactacagctgtaaggtcttcaccggcgtctacccatttatgtggggcggagcctactgcttctgcgacgctgaaaacacgcaattgagcgaagcacacgtggagaagtccgaatcatgcaaaacagaatttgcatcagcatacagggctcataccgcatccgcatcagctaagctccgcgtcctttaccaaggaaataacatcactgtaactgcctatgctaacggcgaccatgccgtcacagttaaggacgccaaattcattgtggggccaatgtcttcagcctggacacctttcgacaacaaaattgtggtgtacaaaggtgacgtctataacatggactacccgccctttggcgcaggaagaccaggacaatttggcgatatccaaagtcgcacacctgagagtaaagacgtctatgctaatacacaactggtactgcagagaccggctgcgggtacggtacatgtgccatactctcaggcaccatctggctttaagtattggctaaaagaacgaggggcgtcgctgcagcacacagcaccatttggctgccaaatagcaacaaacccggtaagagcggtgaattgcgccgtagggaacatgcccatctccatcgacataccggatgcggccttcattagggtcgtcgacgcgccctctttaacggacatgtcgtgcgaggtaccagcctgcacccattcctcagatttcgggggcgtcgccattattaaatatgcagccagcaagaaaggcaagtgtgcggtgcattcgatgaccaacgccgtcacaattcgggaagctgagatagaagttgaagggaattctcagctgcaaatctctttctcgacggccttggccagcgccgaattccgcgtacaagtctgttctacacaagtacactgtgtagccgagtgccaccctccgaaggaccacatagtcaattacccggcgtcacataccaccctcggggtccaggacatttccgctacggcgctgtcatgggtgcagaagatcacgggaggcgtgggactggttgtcgctgttgcagcactgattctaatcgtggtgctatgcgtgtcgttcagcaggcactgataataggctggagcctcggtggccatgcttcttgccccttgggcctccccccagcccctcctccccttcctgcacccgtacccccgtggtctttgaataaagtctgagtgggcggc

SEQ ID NO: 385 - DNA, 5389 bp, unidentified
  source 1..5389: mol_type = genomic DNA; note = Chikungunya Virus
tcaagcttttggaccctcgtacagaagctaatacgactcactatagggaaataagagagaaaagaagagtaagaagaaatataagagccaccatgagtattaaggaccacttcaatgtctataaagccacaagaccgtacctagctcactgtcccgactgtggagaagggcactcgtgccatagtcccgtagcgctagaacgcatcagaaacgaagcgacagacgggacgttgaaaatccaggtttccttgcaaatcggaataaagacggatgatagccatgattggaccaagctgcgttatatggacaatcacatgccagcagacgcagagcgggccgggctatttgtaagaacgtcagcaccgtgcacgattactggaacaatgggacacttcattctggcccgatgtccgaaaggagaaactctgacggtggggttcactgacggtaggaagatcagtcactcatgtacgcacccatttcaccatgaccctcctgtgataggccgggaaaaattccattcccgaccgcagcacggtagggaactaccttgcagcacgtacgcgcagagcaccgctgcaactgccgaggagatagaggtacacatgcccccagacaccccagatcgcacattaatgtcacaacagtccggcaatgtaaagatcacagtcaatagtcagacggtgcggtacaagtgcaattgtggtgactcaagtgaaggattaaccactacagataaagtgattaataactgcaaggtcgatcaatgccatgccgcggtcaccaatcacaaaaaatggcagtataactcccctctggtcccgcgtaatgctgaattcggggaccggaaaggaaaagttcacattccatttcctctggcaaatgtgacatgcagggtgcctaaagcaagaaaccccaccgtgacgtacggaaaaaaccaagtcatcatgttgctgtatcctgaccacccaacgctcctgtcctacaggaatatgggagaagaaccaaactatcaagaagagtgggtgacgcataagaaggagatcaggttaaccgtgccgactgaggggctcgaggtcacgtggggtaacaatgagccgtacaagtattggccgcagttatccacaaacggtacagcccacggccacccgcatgagataattctgtattattatgagctgtacccaactatgactgcggtagttttgtcagtggcctcgttcatactcctgtcgatggtgggtgtggcagtggggatgtgcatgtgtgcacgacgcagatgcattacaccgtacgaactgacaccaggagctaccgtccctttcctgcttagcctaatatgctgcattagaacagctaaagcgtacgaacacgtaacagtgatcccgaacacggtgggagtaccgtataagactctagtcaacagaccgggctacagccccatggtattggagatggagcttctgtctgtcaccttggaaccaacgctatcgcttgattacatcacgtgcgagtataaaaccgttatcccgtctccgtacgtgaaatgctgcggtacagcagagtgtaaggacaagagcctacctgattacagctgtaaggtcttcaccggcgtctacccattcatgtggggcggcgcctactgcttctgcgacaccgaaaatacgcaattgagcgaagcacatgtggagaagtccgaatcatgcaaaacagaatttgcatcagcatacagggctcataccgcatccgcatcagctaagctccgcgtcctttaccaaggaaataatatcactgtggctgcttatgcaaacggcgaccatgccgtcacagttaaggacgctaaattcatagtggggccaatgtcttcagcctggacacctttcgacaataaaatcgtggtgtacaaaggcgacgtctacaacatggactacccgcccttcggcgcaggaagaccaggacaatttggcgacatccaaagtcgcacgcctgagagcgaagacgtctatgctaatacacaactggtactgcagagaccgtccgcgggtacggtgcacgtgccgtactctcaggcaccatctggcttcaagtattggctaaaagaacgaggggcgtcgctgcagcacacagcaccatttggctgtcaaatagcaacaaacccggtaagagcgatgaactgcgccgtagggaacatgcctatctccatcgacataccggacgcggcctttaccagggtcgtcgacgcgccatctttaacggacatgtcgtgtgaggtatcagcctgcacccattcctcagactttgggggcgtagccatcattaaatatgcagccagtaagaaaggcaagtgtgcagtgcactcgatgactaacgccgtcactattcgggaagctgaaatagaagtagaagggaactctcagttgcaaatctctttttcgacggccctagccagcgccgaatttcgcgtacaagtctgttctacacaagtacactgtgcagccgagtgccatccaccgaaagaccatatagtcaattacccggcgtcacacaccaccctcggggtccaagacatttccgctacggcgatgtcatgggtgcagaagatcacgggaggtgtgggactggttgtcgctgttgcagcactgatcctaatcgtggtgctatgcgtgtcgtttagcaggcacatgagtattaaggaccacttcaatgtctataaagccacaagaccgtacctagctcactgtcccgactgtggagaagggcactcgtgccatagtcccgtagcgctagaacgcatcagaaacgaagcgacagacgggacgttgaaaatccaggtttccttgcaaatcggaataaagacggatgatagccatgattggaccaagctgcgttatatggacaatcacatgccagcagacgcagagcgggccgggctatttgtaagaacgtcagcaccgtgcacgattactggaacaatgggacacttcattctggcccgatgtccgaaaggagaaactctgacggtggggttcactgacggtaggaagatcagtcactcatgtacgcacccatttcaccatgaccctcctgtgataggccgggaaaaattccattcccgaccgcagcacggtagggaactaccttgcagcacgtacgcgcagagcaccgctgcaactgccgaggagatagaggtacacatgcccccagacaccccagatcgcacattaatgtcacaacagtccggcaatgtaaagatcacagtcaatagtcagacggtgcggtacaagtgcaattgtggtgactcaagtgaaggattaaccactacagataaagtgattaataactgcaaggtcgatcaatgccatgccgcggtcaccaatcacaaaaaatggcagtataactcccctctggtcccgcgtaatgctgaattcggggaccggaaaggaaaagttcacattccatttcctctggcaaatgtgacatgcagggtgcctaaagcaagaaaccccaccgtgacgtacggaaaaaaccaagtcatcatgttgctgtatcctgaccacccaacgctcctgtcctacaggaatatgggagaagaaccaaactatcaagaagagtgggtgacgcataagaaggagatcaggttaaccgtgccgactgaggggctcgaggtcacgtggggtaacaatgagccgtacaagtattggccgcagttatccacaaacggtacagcccacggccacccgcatgagataattctgtattattatgagctgtacccaactatgactgcggtagttttgtcagtggcctcgttcatactcctgtcgatggtgggtgtggcagtggggatgtgcatgtgtgcacgacgcagatgcattacaccgtacgaactgacaccaggagctaccgtccctttcctgcttagcctaatatgctgcattagaacagctaaagcgtacgaacacgtaacagtgatcccgaacacggtgggagtaccgtataagactctagtcaacagaccgggctacagccccatggtattggagatggagcttctgtctgtcaccttggaaccaacgctatcgcttgattacatcacgtgcgagtataaaaccgttatcccgtctccgtacgtgaaatgctgcggtacagcagagtgtaaggacaagagcctacctgattacagctgtaaggtcttcaccggcgtctacccattcatgtggggcggcgcctactgcttctgcgacaccgaaaatacgcaattgagcgaagcacatgtggagaagtccgaatcatgcaaaacagaatttgcatcagcatacagggctcataccgcatccgcatcagctaagctccgcgtcctttaccaaggaaataatatcactgtggctgcttatgcaaacggcgaccatgccgtcacagttaaggacgctaaattcatagtggggccaatgtcttcagcctggacacctttcgacaataaaatcgtggtgtacaaaggcgacgtctacaacatggactacccgcccttcggcgcaggaagaccaggacaatttggcgacatccaaagtcgcacgcctgagagcgaagacgtctatgctaatacacaactggtactgcagagaccgtccgcgggtacggtgcacgtgccgtactctcaggcaccatctggcttcaagtattggctaaaagaacgaggggcgtcgctgcagcacacagcaccatttggctgtcaaatagcaacaaacccggtaagagcgatgaactgcgccgtagggaacatgcctatctccatcgacataccggacgcggcctttaccagggtcgtcgacgcgccatctttaacggacatgtcgtgtgaggtatcagcctgcacccattcctcagactttgggggcgtagccatcattaaatatgcagccagtaagaaaggcaagtgtgcagtgcactcgatgactaacgccgtcactattcgggaagctgaaatagaagtagaagggaactctcagttgcaaatctctttttcgacggccctagccagcgccgaatttcgcgtacaagtctgttctacacaagtacactgtgcagccgagtgccatccaccgaaagaccatatagtcaattacccggcgtcacacaccaccctcggggtccaagacatttccgctacggcgatgtcatgggtgcagaagatcacgggaggtgtgggactggttgtcgctgttgcagcactgatcctaatcgtggtgctatgcgtgtcgtttagcaggcactgataataggctggagcctcggtggccatgcttcttgccccttgggcctccccccagcccctcctccccttcctgcacccgtacccccgtggtctttgaataaagtctgagtgggcggc

SEQ ID NO: 386 - DNA, 2902 bp, unidentified
  source 1..2902: mol_type = genomic DNA; note = Chikungunya Virus
tcaagcttttggaccctcgtacagaagctaatacgactcactatagggaaataagagagaaaagaagagtaagaagaaatataagagccaccatgccatatctagctcattgtcctgactgcggagaagggcattcgtgccacagccctatcgcattggagcgcatcagaaatgaagcaacggacggaacgctgaaaatccaggtctctttgcagatcgggataaagacagatgacagccacgattggaccaagctgcgctatatggatagccatacgccagcggacgcggagcgagccggattgcttgtaaggacttcagcaccgtgcacgatcaccgggaccatgggacactttattctcgcccgatgcccgaaaggagagacgctgacagtgggatttacggacagcagaaagatcagccacacatgcacacacccgttccatcatgaaccacctgtgataggtagggagaggttccactctcgaccacaacatggtaaagagttaccttgcagcacgtacgtgcagagcaccgctgccactgctgaggagatagaggtgcatatgcccccagatactcctgaccgcacgctgatgacgcagcagtctggcaacgtgaagatcacagttaatgggcagacggtgcggtacaagtgcaactgcggtggctcaaacgagggactgacaaccacagacaaagtgatcaataactgcaaaattgatcagtgccatgctgcagtcactaatcacaagaattggcaatacaactcccctttagtcccgcgcaacgctgaactcggggaccgtaaaggaaagatccacatcccattcccattggcaaacgtgacttgcagagtgccaaaagcaagaaaccctacagtaacttacggaaaaaaccaagtcaccatgctgctgtatcctgaccatccgacactcttgtcttaccgtaacatgggacaggaaccaaattaccacgaggagtgggtgacacacaagaaggaggttaccttgaccgtgcctactgagggtctggaggtcacttggggcaacaacgaaccatacaagtactggccgcagatgtctacgaacggtactgctcatggtcacccacatgagataatcttgtactattatgagctgtaccccactatgactgtagtcattgtgtcggtggcctcgttcgtgcttctgtcgatggtgggcacagcagtgggaatgtgtgtgtgcgcacggcgcagatgcattacaccatatgaattaacaccaggagccactgttcccttcctgctcagcctgctatgctgcctatggaacgaacagcagcccctgttctggttgcaggctcttatcccgctggccgccttgatcgtcctgtgcaactgtctgaaactcttgccatgctgctgtaagaccctggcttttttagccgtaatgagcatcggtgcccacactgtgagcgcgtacgaacacgtaacagtgatcccgaacacggtgggagtaccgtataagactcttgtcaacagaccgggttacagccccatggtgttggagatggagctacaatcagtcaccttggaaccaacactgtcacttgactacatcacgtgcgagtacaaaactgtcatcccctccccgtacgtgaagtgctgtggtacagcagagtgcaaggacaagagcctaccagactacagctgcaaggtctttactggagtctacccatttatgtggggcggcgcctactgcttttgcgacgccgaaaatacgcaattgagcgaggcacatgtagagaaatctgaatcttgcaaaacagagtttgcatcggcctacagagcccacaccgcatcggcgtcggcgaagctccgcgtcctttaccaaggaaacaacattaccgtagctgcctacgctaacggtgaccatgccgtcacagtaaaggacgccaagtttgtcgtgggcccaatgtcctccgcctggacaccttttgacaacaaaatcgtggtgtacaaaggcgacgtctacaacatggactacccaccttttggcgcaggaagaccaggacaatttggtgacattcaaagtcgtacaccggaaagtaaagacgtttatgccaacactcagttggtactacagaggccagcagcaggcacggtacatgtaccatactctcaggcaccatctggcttcaagtattggctgaaggaacgaggagcatcgctacagcacacggcaccgttcggttgccagattgcgacaaacccggtaagagctgtaaattgcgctgtggggaacataccaatttccatcgacataccggatgcggcctttactagggttgtcgatgcaccctctgtaacggacatgtcatgcgaagtaccagcctgcactcactcctccgactttgggggcgtcgccatcatcaaatacacagctagcaagaaaggtaaatgtgcagtacattcgatgaccaacgccgttaccattcgagaagccgacgtagaagtagaggggaactcccagctgcaaatatccttctcaacagccctggcaagcgccgagtttcgcgtgcaagtgtgctccacacaagtacactgcgcagccgcatgccaccctccaaaggaccacatagtcaattacccagcatcacacaccacccttggggtccaggatatatccacaacggcaatgtcttgggtgcagaagattacgggaggagtaggattaattgttgctgttgctgccttaattttaattgtggtgctatgcgtgtcgtttagcaggcactaatgataataggctggagcctcggtggccatgcttcttgccccttgggcctccccccagcccctcctccccttcctgcacccgtacccccgtggtctttgaataaagtctgagtgggcggc

SEQ ID NO: 387 - DNA, 3979 bp, unidentified
  source 1..3979: mol_type = genomic DNA; note = Chikungunya Virus
tcaagcttttggaccctcgtacagaagctaatacgactcactatagggaaataagagagaaaagaagagtaagaagaaatataagagccaccatggagtttatccctacgcagacgttctataatcggaggtaccagcccaggccttgggccccccgccctacaatccaagtgataagaccacgtcccaggccgcagagacaagccggccaattggcgcaactcatcagcgcagttaacaagttgaccatgcgagcggttcctcagcagaagccgaggcggaaccggaagaataagaaacaacgccaaaagaaacaggcgccgcagaacgaccctaaacagaagaaacaacctccccagaaaaagccagctcagaagaagaagaagcctggacgccgtgaaagaatgtgcatgaaaatcgaaaatgattgcatctttgaggtgaagcacgagggcaaagtgatggggtacgcatgcctggtgggcgataaggtcatgaagccagcacatgtgaaggggacaatcgataatgctgatctggccaagctagcttttaaacgtagctccaaatacgatcttgagtgtgcccagatacctgtgcacatgaaatctgatgcaagcaagttcacacacgagaagcctgagggctattataactggcatcatggtgcggttcagtactccggcggccgatttaccattcctacaggggcaggaaagccgggcgattcggggagacccattttcgacaacaaaggccgcgtggtagctatcgtgctcggtggggctaatgagggtgcacgtactgcacttagcgtggttacctggaataaggacattgtcacaaagattacaccggagggagcagaggaatggagcctggcactgcccgttctgtgcctgctggccaacaccactttcccatgtagtcaacccccttgcactccctgctgctatgagaaagagcctgagagcacgttacgtatgctggaagataatgtcatgaggcccgggtactatcaactgctcaaggctagtctgacatgctcgccccacaggcagcgcaggtccacgaaagataacttcaacgtttacaaggctactaggccttatttggcccactgtcccgattgcggagagggacattcttgtcatagtcctattgccttggagcgaatccgcaacgaggccactgatggaacccttaagattcaagtatctttgcagattggcattaagacagatgattcccatgactggacaaagcttcggtacatggactcacacacgcctgcagatgctgaaagggcagggctcttggtcaggacctcggccccttgtacaattaccgggaccatgggccacttcatccttgcacgctgccctaagggggagacgctgacggtgggctttactgactcgcgtaagatctcacacacatgtacacaccctttccaccacgaacctccagtcatagggagagagagatttcactctcgcccacagcatggcaaagagctgccatgctccacatatgtccagagcactgctgctaccgctgaagaaattgaggttcacatgccacccgatacaccagaccgtactctgatgacccaacagagcggcaacgtgaagattaccgtaaatggacagaccgtgagatataagtgcaactgtggtggctccaatgagggcttaacaacaacggataaggtgattaacaattgcaaaatagatcagtgccatgccgcagtgaccaatcacaagaattggcaatacaactcacccctagtgccgaggaacgcagaactaggcgacaggaaagggaaaatccatatacccttccccctagcaaatgtgacctgccgagtgcccaaggccagaaaccccacggttacttacggcaagaaccaggtgacgatgcttttgtacccagaccatcccaccttgctctcttatagaaacatgggacaggagcctaactatcatgaggagtgggtgacacacaagaaagaagtcacccttaccgtgcctaccgaagggcttgaagtcacctggggcaacaacgagccttacaagtattggccacagatgtccacaaacggaacagcccacggccacccgcacgagatcatactgtattactatgagctttatcccacaatgactgtcgtaattgtgagcgttgccagcttcgtgttgctttcaatggttggcactgccgtggggatgtgcgtgtgtgctaggcgccgctgtataactccttatgaactaactccaggcgccaccgttcctttcctgctctcactactgtgttgtgtgcgcacaacaaaggctgccacctactacgaagccgccgcctacttatggaatgaacagcagcctctcttttggttacaggcgctgattcctcttgctgccctgatcgtgctatgcaactgcctcaagctgctgccctgttgttgcaagaccctagcttttctcgccgtgatgagcatcggggcacatacagtgtccgcctatgagcacgtcaccgttatcccgaacaccgtcggtgtgccatataagacgttagtcaatcgacccggctactctccaatggtgctggaaatggaactccagagtgtgacactggagccaaccttatccctcgattatattacctgcgaatacaagaccgtcatcccttcaccctatgtcaagtgctgtgggaccgctgaatgcaaagacaagagcttgcctgattacagttgcaaggtcttcacaggtgtgtaccccttcatgtgggggggagcttattgcttttgtgatgctgagaacacccaactgagcgaggctcacgtcgagaaatctgagtcttgcaagaccgagtttgcctcagcttacagggcccacacggccagcgcatccgccaaattgagggtactctaccagggtaataatatcaccgttgccgcatatgcaaacggcgatcacgccgtgactgtcaaggatgccaagttcgttgtgggccccatgtctagcgcttggacaccgttcgataataagatcgtcgtgtacaaaggggacgtgtataatatggactacccacctttcggggccggccgaccgggacagttcggggatattcagagccgcacacccgaatctaaagatgtttacgccaatactcagctcgtcctgcagaggcccgccgctggtacagttcacgttccttactcacaggcaccctctgggtttaagtattggctgaaagaacgaggtgccagcttgcagcatacagcgcctttcggatgccagattgccactaaccccgtacgggctgtcaactgcgcggtcggcaatattcccattagcattgatatcccggacgcagctttcaccagggttgtggacgccccgagcgtcaccgacatgagttgtgaggtgccagcctgcacgcatagcagtgatttcggcggcgtcgccatcattaaatataccgcaagcaagaaaggcaagtgcgccgtccactcgatgactaacgccgtcacaattcgggaagccgatgttgaggtcgaaggcaactcccagctgcagatcagcttctctactgctcttgcaagcgccgagtttcgagtccaggtctgcagtacgcaggtgcattgtgcagctgcctgccatccacccaaagatcatattgtgaattatccggcgtcacataccacactgggggtccaggatattagtacaacggcgatgtcctgggtgcagaaaattacgggaggagtgggcttaattgttgccgtggcggccctgatcctgatcgttgtgctgtgtgttagcttctctaggcatgactataaagatgacgatgacaaatgataataggctggagcctcggtggccatgcttcttgccccttgggcctccccccagcccctcctccccttcctgcacccgtacccccgtggtctttgaataaagtctgagtgggcggc

SEQ ID NO: 388 - DNA, 3955 bp, unidentified
  source 1..3955: mol_type = genomic DNA; note = Chikungunya Virus
tcaagcttttggaccctcgtacagaagctaatacgactcactatagggaaataagagagaaaagaagagtaagaagaaatataagagccaccatggagtttatccctacgcagacgttctataatcggaggtaccagcccaggccttgggccccccgccctacaatccaagtgataagaccacgtcccaggccgcagagacaagccggccaattggcgcaactcatcagcgcagttaacaagttgaccatgcgagcggttcctcagcagaagccgaggcggaaccggaagaataagaaacaacgccaaaagaaacaggcgccgcagaacgaccctaaacagaagaaacaacctccccagaaaaagccagctcagaagaagaagaagcctggacgccgtgaaagaatgtgcatgaaaatcgaaaatgattgcatctttgaggtgaagcacgagggcaaagtgatggggtacgcatgcctggtgggcgataaggtcatgaagccagcacatgtgaaggggacaatcgataatgctgatctggccaagctagcttttaaacgtagctccaaatacgatcttgagtgtgcccagatacctgtgcacatgaaatctgatgcaagcaagttcacacacgagaagcctgagggctattataactggcatcatggtgcggttcagtactccggcggccgatttaccattcctacaggggcaggaaagccgggcgattcggggagacccattttcgacaacaaaggccgcgtggtagctatcgtgctcggtggggctaatgagggtgcacgtactgcacttagcgtggttacctggaataaggacattgtcacaaagattacaccggagggagcagaggaatggagcctggcactgcccgttctgtgcctgctggccaacaccactttcccatgtagtcaacccccttgcactccctgctgctatgagaaagagcctgagagcacgttacgtatgctggaagataatgtcatgaggcccgggtactatcaactgctcaaggctagtctgacatgctcgccccacaggcagcgcaggtccacgaaagataacttcaacgtttacaaggctactaggccttatttggcccactgtcccgattgcggagagggacattcttgtcatagtcctattgccttggagcgaatccgcaacgaggccactgatggaacccttaagattcaagtatctttgcagattggcattaagacagatgattcccatgactggacaaagcttcggtacatggactcacacacgcctgcagatgctgaaagggcagggctcttggtcaggacctcggccccttgtacaattaccgggaccatgggccacttcatccttgcacgctgccctaagggggagacgctgacggtgggctttactgactcgcgtaagatctcacacacatgtacacaccctttccaccacgaacctccagtcatagggagagagagatttcactctcgcccacagcatggcaaagagctgccatgctccacatatgtccagagcactgctgctaccgctgaagaaattgaggttcacatgccacccgatacaccagaccgtactctgatgacccaacagagcggcaacgtgaagattaccgtaaatggacagaccgtgagatataagtgcaactgtggtggctccaatgagggcttaacaacaacggataaggtgattaacaattgcaaaatagatcagtgccatgccgcagtgaccaatcacaagaattggcaatacaactcacccctagtgccgaggaacgcagaactaggcgacaggaaagggaaaatccatatacccttccccctagcaaatgtgacctgccgagtgcccaaggccagaaaccccacggttacttacggcaagaaccaggtgacgatgcttttgtacccagaccatcccaccttgctctcttatagaaacatgggacaggagcctaactatcatgaggagtgggtgacacacaagaaagaagtcacccttaccgtgcctaccgaagggcttgaagtcacctggggcaacaacgagccttacaagtattggccacagatgtccacaaacggaacagcccacggccacccgcacgagatcatactgtattactatgagctttatcccacaatgactgtcgtaattgtgagcgttgccagcttcgtgttgctttcaatggttggcactgccgtggggatgtgcgtgtgtgctaggcgccgctgtataactccttatgaactaactccaggcgccaccgttcctttcctgctctcactactgtgttgtgtgcgcacaacaaaggctgccacctactacgaagccgccgcctacttatggaatgaacagcagcctctcttttggttacaggcgctgattcctcttgctgccctgatcgtgctatgcaactgcctcaagctgctgccctgttgttgcaagaccctagcttttctcgccgtgatgagcatcggggcacatacagtgtccgcctatgagcacgtcaccgttatcccgaacaccgtcggtgtgccatataagacgttagtcaatcgacccggctactctccaatggtgctggaaatggaactccagagtgtgacactggagccaaccttatccctcgattatattacctgcgaatacaagaccgtcatcccttcaccctatgtcaagtgctgtgggaccgctgaatgcaaagacaagagcttgcctgattacagttgcaaggtcttcacaggtgtgtaccccttcatgtgggggggagcttattgcttttgtgatgctgagaacacccaactgagcgaggctcacgtcgagaaatctgagtcttgcaagaccgagtttgcctcagcttacagggcccacacggccagcgcatccgccaaattgagggtactctaccagggtaataatatcaccgttgccgcatatgcaaacggcgatcacgccgtgactgtcaaggatgccaagttcgttgtgggccccatgtctagcgcttggacaccgttcgataataagatcgtcgtgtacaaaggggacgtgtataatatggactacccacctttcggggccggccgaccgggacagttcggggatattcagagccgcacacccgaatctaaagatgtttacgccaatactcagctcgtcctgcagaggcccgccgctggtacagttcacgttccttactcacaggcaccctctgggtttaagtattggctgaaagaacgaggtgccagcttgcagcatacagcgcctttcggatgccagattgccactaaccccgtacgggctgtcaactgcgcggtcggcaatattcccattagcattgatatcccggacgcagctttcaccagggttgtggacgccccgagcgtcaccgacatgagttgtgaggtgccagcctgcacgcatagcagtgatttcggcggcgtcgccatcattaaatataccgcaagcaagaaaggcaagtgcgccgtccactcgatgactaacgccgtcacaattcgggaagccgatgttgaggtcgaaggcaactcccagctgcagatcagcttctctactgctcttgcaagcgccgagtttcgagtccaggtctgcagtacgcaggtgcattgtgcagctgcctgccatccacccaaagatcatattgtgaattatccggcgtcacataccacactgggggtccaggatattagtacaacggcgatgtcctgggtgcagaaaattacgggaggagtgggcttaattgttgccgtggcggccctgatcctgatcgttgtgctgtgtgttagcttctctaggcattgataataggctggagcctcggtggccatgcttcttgccccttgggcctccccccagcccctcctccccttcctgcacccgtacccccgtggtctttgaataaagtctgagtgggcggc

SEQ ID NO: 389 - RNA, 1537 nt, unidentified
  source 1..1537: mol_type = genomic RNA; note = Chikungunya Virus
tcaagcttttggaccctcgtacagaagctaatacgactcactatagggaaataagagagaaaagaagagtaagaagaaatataagagccaccatggagacacctgcacagctgttgtttctgctgctgctttggttgcccgataccaccggtgactacaaagacgacgacgataaatacgagcacgtgacggtaataccaaacactgtgggggtgccatacaagaccctggtaaatcgcccaggctactctcccatggtgctggagatggagctccagtctgtgaccttagagccaaccctctcactcgactatatcacctgtgaatacaaaacagtgatcccatccccctacgtgaaatgttgcggaactgcagagtgtaaggataagagtctgcccgattacagctgcaaggtgtttacaggcgtgtatccatttatgtggggaggagcctactgtttttgcgatgccgaaaatactcagctgtctgaagcccatgtggagaagagtgaaagttgcaagaccgaatttgctagtgcctacagggcacacaccgcttctgcctccgctaaactccgagtcctttaccagggcaataatattacggtcgctgcctacgctaacggggaccacgctgtgacagtcaaggacgccaaattcgtagtgggcccaatgagctccgcctggactcccttcgacaacaaaatcgtcgtgtataaaggcgacgtgtacaatatggactacccacccttcggggctggaagaccgggccagtttggagatatccaatcaaggacacccgagtcaaaggacgtgtacgccaatacgcagctggtgctgcagagacccgccgctggtaccgtgcatgtgccttattcccaagctccatctggcttcaagtactggttgaaagagcgcggtgcttcgctgcagcatacagcaccgttcggatgtcagatagcaaccaaccctgtacgggctgtcaactgtgccgtgggaaatatacctatttccatcgacattccggacgcagctttcacacgtgtcgttgatgccccctcagtgactgacatgtcatgtgaggtgcctgcttgcacccacagcagcgattttggcggagtggccataatcaagtacaccgcctccaaaaaaggaaagtgtgccgtacactctatgaccaacgccgtcacaatcagagaagccgacgttgaagtagagggaaattcacagctgcaaatcagcttcagcaccgctcttgcctctgctgagtttagggttcaggtttgcagtactcaggtgcactgtgcagccgcttgccatccccccaaggatcatatcgtgaattatcctgcatcccacaccacactgggagtccaggatatctcaacaactgcaatgtcttgggtgcagaagatcacctgataataggctggagcctcggtggccatgcttcttgccccttgggcctccccccagcccctcctccccttcctgcacccgtacccccgtggtctttgaataaagtctgagtgggcggc

SEQ ID NO: 390 - RNA, 1531 nt, unidentified
  source 1..1531: mol_type = genomic RNA; note = Chikungunya Virus
tcaagcttttggaccctcgtacagaagctaatacgactcactatagggaaataagagagaaaagaagagtaagaagaaatataagagccaccatgtacgaacacgtaacagtgatcccgaacacggtgggagtaccgtataagactctagtcaacagaccgggctacagccccatggtattggagatggagcttctgtctgtcaccttggaaccaacgctatcgcttgattacatcacgtgcgagtataaaaccgttatcccgtctccgtacgtgaaatgctgcggtacagcagagtgtaaggacaagagcctacctgattacagctgtaaggtcttcaccggcgtctacccattcatgtggggcggcgcctactgcttctgcgacaccgaaaatacgcaattgagcgaagcacatgtggagaagtccgaatcatgcaaaacagaatttgcatcagcatacagggctcataccgcatccgcatcagctaagctccgcgtcctttaccaaggaaataatatcactgtggctgcttatgcaaacggcgaccatgccgtcacagttaaggacgctaaattcatagtggggccaatgtcttcagcctggacacctttcgacaataaaatcgtggtgtacaaaggcgacgtctacaacatggactacccgcccttcggcgcaggaagaccaggacaatttggcgacatccaaagtcgcacgcctgagagcgaagacgtctatgctaatacacaactggtactgcagagaccgtccgcgggtacggtgcacgtgccgtactctcaggcaccatctggcttcaagtattggctaaaagaacgaggggcgtcgctgcagcacacagcaccatttggctgtcaaatagcaacaaacccggtaagagcgatgaactgcgccgtagggaacatgcctatctccatcgacataccggacgcggcctttaccagggtcgtcgacgcgccatctttaacggacatgtcgtgtgaggtatcagcctgcacccattcctcagactttgggggcgtagccatcattaaatatgcagccagtaagaaaggcaagtgtgcagtgcactcgatgactaacgccgtcactattcgggaagctgaaatagaagtagaagggaactctcagttgcaaatctctttttcgacggccctagccagcgccgaatttcgcgtacaagtctgttctacacaagtacactgtgcagccgagtgccatccaccgaaagaccatatagtcaattacccggcgtcacacaccaccctcggggtccaagacatttccgctacggcgatgtcatgggtgcagaagatcacgggaggtgtgggactggttgtcgctgttgcagcactgatcctaatcgtggtgctatgcgtgtcgtttagcaggcactgataataggctggagcctcggtggccatgcttcttgccccttgggcctccccccagcccctcctccccttcctgcacccgtacccccgtggtctttgaataaagtctgagtgggcggc

SEQ ID NO: 391 - RNA, 1690 nt, unidentified
  source 1..1690: mol_type = genomic RNA; note = Chikungunya Virus
tcaagcttttggaccctcgtacagaagctaatacgactcactatagggaaataagagagaaaagaagagtaagaagaaatataagagccaccatgctatggaacgaacagcagcccctgttctggttgcaggctcttatcccgctggccgccttgatcgtcctgtgcaactgtctgaaactcttgccatgctgctgtaagaccctggcttttttagccgtaatgagcatcggtgcccacactgtgagcgcgtacgaacacgtaacagtgatcccgaacacggtgggagtaccgtataagactcttgtcaacagaccgggttacagccccatggtgttggagatggagctacaatcagtcaccttggaaccaacactgtcacttgactacatcacgtgcgagtacaaaactgtcatcccctccccgtacgtgaagtgctgtggtacagcagagtgcaaggacaagagcctaccagactacagctgcaaggtctttactggagtctacccatttatgtggggcggcgcctactgcttttgcgacgccgaaaatacgcaattgagcgaggcacatgtagagaaatctgaatcttgcaaaacagagtttgcatcggcctacagagcccacaccgcatcggcgtcggcgaagctccgcgtcctttaccaaggaaacaacattaccgtagctgcctacgctaacggtgaccatgccgtcacagtaaaggacgccaagtttgtcgtgggcccaatgtcctccgcctggacaccttttgacaacaaaatcgtggtgtacaaaggcgacgtctacaacatggactacccaccttttggcgcaggaagaccaggacaatttggtgacattcaaagtcgtacaccggaaagtaaagacgtttatgccaacactcagttggtactacagaggccagcagcaggcacggtacatgtaccatactctcaggcaccatctggcttcaagtattggctgaaggaacgaggagcatcgctacagcacacggcaccgttcggttgccagattgcgacaaacccggtaagagctgtaaattgcgctgtggggaacataccaatttccatcgacataccggatgcggcctttactagggttgtcgatgcaccctctgtaacggacatgtcatgcgaagtaccagcctgcactcactcctccgactttgggggcgtcgccatcatcaaatacacagctagcaagaaaggtaaatgtgcagtacattcgatgaccaacgccgttaccattcgagaagccgacgtagaagtagaggggaactcccagctgcaaatatccttctcaacagccctggcaagcgccgagtttcgcgtgcaagtgtgctccacacaagtacactgcgcagccgcatgccaccctccaaaggaccacatagtcaattacccagcatcacacaccacccttggggtccaggatatatccacaacggcaatgtcttgggtgcagaagattacgggaggagtaggattaattgttgctgttgctgccttaattttaattgtggtgctatgcgtgtcgtttagcaggcactaatgataataggctggagcctcggtggccatgcttcttgccccttgggcctccccccagcccctcctccccttcctgcacccgtacccccgtggtctttgaataaagtctgagtgggcggc

SEQ ID NO: 392 - RNA, 1531 nt, unidentified
  source 1..1531: mol_type = genomic RNA; note = Chikungunya Virus
tcaagcttttggaccctcgtacagaagctaatacgactcactatagggaaataagagagaaaagaagagtaagaagaaatataagagccaccatgtacgaacacgtaacagtgatcccgaacacggtgggagtaccgtataagactctagtcaatagaccgggctacagtcccatggtattggagatggaactactgtcagtcactttggagccaacgctatcgcttgattacatcacgtgcgagtacaaaaccgttatcccgtctccgtacgtgaaatgctgcggtacagcagagtgcaaggacaaaaacctacctgactacagctgtaaggtcttcaccggcgtctacccatttatgtggggcggagcctactgcttctgcgacgctgaaaacacgcaattgagcgaagcacacgtggagaagtccgaatcatgcaaaacagaatttgcatcagcatacagggctcataccgcatccgcatcagctaagctccgcgtcctttaccaaggaaataacatcactgtaactgcctatgctaacggcgaccatgccgtcacagttaaggacgccaaattcattgtggggccaatgtcttcagcctggacacctttcgacaacaaaattgtggtgtacaaaggtgacgtctataacatggactacccgccctttggcgcaggaagaccaggacaatttggcgatatccaaagtcgcacacctgagagtaaagacgtctatgctaatacacaactggtactgcagagaccggctgcgggtacggtacatgtgccatactctcaggcaccatctggctttaagtattggctaaaagaacgaggggcgtcgctgcagcacacagcaccatttggctgccaaatagcaacaaacccggtaagagcggtgaattgcgccgtagggaacatgcccatctccatcgacataccggatgcggccttcattagggtcgtcgacgcgccctctttaacggacatgtcgtgcgaggtaccagcctgcacccattcctcagatttcgggggcgtcgccattattaaatatgcagccagcaagaaaggcaagtgtgcggtgcattcgatgaccaacgccgtcacaattcgggaagctgagatagaagttgaagggaattctcagctgcaaatctctttctcgacggccttggccagcgccgaattccgcgtacaagtctgttctacacaagtacactgtgtagccgagtgccaccctccgaaggaccacatagtcaattacccggcgtcacataccaccctcggggtccaggacatttccgctacggcgctgtcatgggtgcagaagatcacgggaggcgtgggactggttgtcgctgttgcagcactgattctaatcgtggtgctatgcgtgtcgttcagcaggcactgataataggctggagcctcggtggccatgcttcttgccccttgggcctccccccagcccctcctccccttcctgcacccgtacccccgtggtctttgaataaagtctgagtgggcggc

SEQ ID NO: 393 - RNA, 1340 nt, unidentified
  source 1..1340: mol_type = genomic RNA; note = Chikungunya Virus
atggagaccccagctcagcttctgtttcttctccttctatggctgcctgacacgactggacatcaccaccatcatcatagtacaaaagacaatttcaatgtgtacaaggccacccgcccttatttagcacactgtccagattgcggtgaggggcactcctgtcactctcctatcgccttggagcggatccggaatgaggcgaccgatggaacactgaaaatccaggtaagcttgcagattggcatcaagactgacgatagccatgattggaccaaactacggtatatggatagccatacacctgccgatgctgaacgggccggtctgcttgtgagaactagcgctccatgcaccatcacggggacaatgggacattttatcctggctagatgcccaaagggcgaaaccctcaccgtcggattcaccgactcaaggaaaatttctcacacatgtacccatcccttccaccatgagccaccggtgatcgggcgcgaacgcttccacagcaggcctcagcatggaaaagaactgccatgctcgacctatgtacagtccaccgccgctaccgccgaagagatcgaagtgcatatgcctcccgacacacccgaccgaaccctaatgacacaacaatctgggaatgtgaagattacagtcaatggacagactgtgaggtataagtgtaactgcggtggctcaaatgagggcctcaccacaacggataaggtgatcaataactgcaaaattgaccagtgtcacgcggccgtgaccaaccataagaactggcagtacaactcacccttagtgcctaggaacgctgagctgggagatcgcaaggggaagatacacattcccttcccgttggcgaatgtgacctgccgtgtgccaaaagcgagaaatcctaccgtaacatatggcaaaaatcaggtgaccatgttgctctacccggatcacccaactctgctgagctatcggaatatgggacaagaacccaattaccacgaggaatgggttacgcacaagaaagaggtgacccttacagtccctactgaaggtctggaagtgacctggggcaataacgagccttataagtactggccccagatgagtacaaacggcaccgcccatggacatccacacgagatcattctgtattactacgaactatatcccacaatgactggcaagcctataccaaacccacttctcggccttgatagcacatgataataggctggagcctcggtggccatgcttcttgccccttgggcctccccccagcccctcctccccttcctgcacccgtacccccgtggtctttgaataaagtctgagtgggcggc

SEQ ID NO: 394 - RNA, 1483 nt, unidentified
  source 1..1483: mol_type = genomic RNA; note = Chikungunya Virus
tcaagcttttggaccctcgtacagaagctaatacgactcactatagggaaataagagagaaaagaagagtaagaagaaatataagagccaccatgagtaccaaggacaacttcaatgtctataaagccacaagaccgtacttagctcactgtcccgactgtggagaagggcactcgtgccatagtcccgtagcattagaacgcatcagaaatgaagcgacagacgggacgctgaaaatccaggtctccttgcaaatcggaataaagacggatgatagccacgattggaccaagctgcgttacatggacaaccacacgccagcggacgcagagagggcggggctatttgtaagaacatcagcaccgtgcacgattactggaacaatgggacacttcatcctgacccgatgtccgaaaggggaaactctgacggtgggattcactgacagtaggaagatcagtcactcatgtacgcacccatttcaccacgaccctcctgtgataggccgggagaaattccattcccgaccgcagcacggtaaagagctgccttgcagcacgtacgtgcagagcaccgccgcaactaccgaggagatagaggtacacatgcccccagacacccctgatcgcacattgatgtcacaacagtccggcaacgtaaagatcacagttaatggccagacggtgcggtacaagtgtaattgcggtggctcaaatgaaggactaataactacagacaaagtgattaataactgcaaagttgatcaatgtcatgccgcggtcaccaatcacaaaaagtggcagtacaactcccctctggtcccgcgtaatgctgaacttggggaccgaaaaggaaaaatccacatcccgtttccgctggcaaatgtaacatgcagggtgcctaaagcaaggaaccccaccgtgacgtacgggaaaaaccaagtcatcatgctactgtatcccgaccacccaacactcctgtcctaccggaacatgggagaagaaccaaactaccaagaagagtgggtgacgcataagaaggaagtcgtgctaaccgtgccgactgaagggctcgaggtcacgtggggtaacaacgagccgtataagtattggccgcagttatctacaaacggtacagcccatggccacccgcatgagataattctgtattattatgagctgtaccctactatgactgtagtagttgtgtcagtggcctcgttcgtactcctgtcgatggtgggtgtggcagtggggatgtgcatgtgtgcacgacgcagatgcatcacaccgtacgaactgacaccaggagctaccgtccctttcctgcttagcctaatatgctgcatcagaacagctaaagcgtgataataggctggagcctcggtggccatgcttcttgccccttgggcctccccccagcccctcctccccttcctgcacccgtacccccgtggtctttgaataaagtctgagtgggcggc

SEQ ID NO: 395 - RNA, 1483 nt, unidentified
  source 1..1483: mol_type = genomic RNA; note = Chikungunya Virus
tcaagcttttggaccctcgtacagaagctaatacgactcactatagggaaataagagagaaaagaagagtaagaagaaatataagagccaccatgagtattaaggaccacttcaatgtctataaagccacaagaccgtacctagctcactgtcccgactgtggagaagggcactcgtgccatagtcccgtagcgctagaacgcatcagaaacgaagcgacagacgggacgttgaaaatccaggtttccttgcaaatcggaataaagacggatgatagccatgattggaccaagctgcgttatatggacaatcacatgccagcagacgcagagcgggccgggctatttgtaagaacgtcagcaccgtgcacgattactggaacaatgggacacttcattctggcccgatgtccgaaaggagaaactctgacggtggggttcactgacggtaggaagatcagtcactcatgtacgcacccatttcaccatgaccctcctgtgataggccgggaaaaattccattcccgaccgcagcacggtagggaactaccttgcagcacgtacgcgcagagcaccgctgcaactgccgaggagatagaggtacacatgcccccagacaccccagatcgcacattaatgtcacaacagtccggcaatgtaaagatcacagtcaatagtcagacggtgcggtacaagtgcaattgtggtgactcaagtgaaggattaaccactacagataaagtgattaataactgcaaggtcgatcaatgccatgccgcggtcaccaatcacaaaaaatggcagtataactcccctctggtcccgcgtaatgctgaattcggggaccggaaaggaaaagttcacattccatttcctctggcaaatgtgacatgcagggtgcctaaagcaagaaaccccaccgtgacgtacggaaaaaaccaagtcatcatgttgctgtatcctgaccacccaacgctcctgtcctacaggaatatgggagaagaaccaaactatcaagaagagtgggtgacgcataagaaggagatcaggttaaccgtgccgactgaggggctcgaggtcacgtggggtaacaatgagccgtacaagtattggccgcagttatccacaaacggtacagcccacggccacccgcatgagataattctgtattattatgagctgtacccaactatgactgcggtagttttgtcagtggcctcgttcatactcctgtcgatggtgggtgtggcagtggggatgtgcatgtgtgcacgacgcagatgcattacaccgtacgaactgacaccaggagctaccgtccctttcctgcttagcctaatatgctgcattagaacagctaaagcgtgataataggctggagcctcggtggccatgcttcttgccccttgggcctccccccagcccctcctccccttcctgcacccgtacccccgtggtctttgaataaagtctgagtgggcggc

SEQ ID NO: 396 - RNA, 1426 nt, unidentified
  source 1..1426: mol_type = genomic RNA; note = Chikungunya Virus
tcaagcttttggaccctcgtacagaagctaatacgactcactatagggaaataagagagaaaagaagagtaagaagaaatataagagccaccatgccatatctagctcattgtcctgactgcggagaagggcattcgtgccacagccctatcgcattggagcgcatcagaaatgaagcaacggacggaacgctgaaaatccaggtctctttgcagatcgggataaagacagatgacagccacgattggaccaagctgcgctatatggatagccatacgccagcggacgcggagcgagccggattgcttgtaaggacttcagcaccgtgcacgatcaccgggaccatgggacactttattctcgcccgatgcccgaaaggagagacgctgacagtgggatttacggacagcagaaagatcagccacacatgcacacacccgttccatcatgaaccacctgtgataggtagggagaggttccactctcgaccacaacatggtaaagagttaccttgcagcacgtacgtgcagagcaccgctgccactgctgaggagatagaggtgcatatgcccccagatactcctgaccgcacgctgatgacgcagcagtctggcaacgtgaagatcacagttaatgggcagacggtgcggtacaagtgcaactgcggtggctcaaacgagggactgacaaccacagacaaagtgatcaataactgcaaaattgatcagtgccatgctgcagtcactaatcacaagaattggcaatacaactcccctttagtcccgcgcaacgctgaactcggggaccgtaaaggaaagatccacatcccattcccattggcaaacgtgacttgcagagtgccaaaagcaagaaaccctacagtaacttacggaaaaaaccaagtcaccatgctgctgtatcctgaccatccgacactcttgtcttaccgtaacatgggacaggaaccaaattaccacgaggagtgggtgacacacaagaaggaggttaccttgaccgtgcctactgagggtctggaggtcacttggggcaacaacgaaccatacaagtactggccgcagatgtctacgaacggtactgctcatggtcacccacatgagataatcttgtactattatgagctgtaccccactatgactgtagtcattgtgtcggtggcctcgttcgtgcttctgtcgatggtgggcacagcagtgggaatgtgtgtgtgcgcacggcgcagatgcattacaccatatgaattaacaccaggagccactgttcccttcctgctcagcctgctatgctgctgataataggctggagcctcggtggccatgcttcttgccccttgggcctccccccagcccctcctccccttcctgcacccgtacccccgtggtctttgaataaagtctgagtgggcggc

SEQ ID NO: 397 - RNA, 2800 nt, unidentified
  source 1..2800: mol_type = genomic RNA; note = Chikungunya Virus
tcaagcttttggaccctcgtacagaagctaatacgactcactatagggaaataagagagaaaagaagagtaagaagaaatataagagccaccatgagtaccaaggacaacttcaatgtctataaagccacaagaccgtacttagctcactgtcccgactgtggagaagggcactcgtgccatagtcccgtagcattagaacgcatcagaaatgaagcgacagacgggacgctgaaaatccaggtctccttgcaaatcggaataaagacggatgatagccacgattggaccaagctgcgttacatggacaaccacacgccagcggacgcagagagggcggggctatttgtaagaacatcagcaccgtgcacgattactggaacaatgggacacttcatcctgacccgatgtccgaaaggggaaactctgacggtgggattcactgacagtaggaagatcagtcactcatgtacgcacccatttcaccacgaccctcctgtgataggccgggagaaattccattcccgaccgcagcacggtaaagagctgccttgcagcacgtacgtgcagagcaccgccgcaactaccgaggagatagaggtacacatgcccccagacacccctgatcgcacattgatgtcacaacagtccggcaacgtaaagatcacagttaatggccagacggtgcggtacaagtgtaattgcggtggctcaaatgaaggactaataactacagacaaagtgattaataactgcaaagttgatcaatgtcatgccgcggtcaccaatcacaaaaagtggcagtacaactcccctctggtcccgcgtaatgctgaacttggggaccgaaaaggaaaaatccacatcccgtttccgctggcaaatgtaacatgcagggtgcctaaagcaaggaaccccaccgtgacgtacgggaaaaaccaagtcatcatgctactgtatcccgaccacccaacactcctgtcctaccggaacatgggagaagaaccaaactaccaagaagagtgggtgacgcataagaaggaagtcgtgctaaccgtgccgactgaagggctcgaggtcacgtggggtaacaacgagccgtataagtattggccgcagttatctacaaacggtacagcccatggccacccgcatgagataattctgtattattatgagctgtaccctactatgactgtagtagttgtgtcagtggcctcgttcgtactcctgtcgatggtgggtgtggcagtggggatgtgcatgtgtgcacgacgcagatgcatcacaccgtacgaactgacaccaggagctaccgtccctttcctgcttagcctaatatgctgcatcagaacagctaaagcgtacgaacacgtaacagtgatcccgaacacggtgggagtaccgtataagactctagtcaatagaccgggctacagtcccatggtattggagatggaactactgtcagtcactttggagccaacgctatcgcttgattacatcacgtgcgagtacaaaaccgttatcccgtctccgtacgtgaaatgctgcggtacagcagagtgcaaggacaaaaacctacctgactacagctgtaaggtcttcaccggcgtctacccatttatgtggggcggagcctactgcttctgcgacgctgaaaacacgcaattgagcgaagcacacgtggagaagtccgaatcatgcaaaacagaatttgcatcagcatacagggctcataccgcatccgcatcagctaagctccgcgtcctttaccaaggaaataacatcactgtaactgcctatgctaacggcgaccatgccgtcacagttaaggacgccaaattcattgtggggccaatgtcttcagcctggacacctttcgacaacaaaattgtggtgtacaaaggtgacgtctataacatggactacccgccctttggcgcaggaagaccaggacaatttggcgatatccaaagtcgcacacctgagagtaaagacgtctatgctaatacacaactggtactgcagagaccggctgcgggtacggtacatgtgccatactctcaggcaccatctggctttaagtattggctaaaagaacgaggggcgtcgctgcagcacacagcaccatttggctgccaaatagcaacaaacccggtaagagcggtgaattgcgccgtagggaacatgcccatctccatcgacataccggatgcggccttcattagggtcgtcgacgcgccctctttaacggacatgtcgtgcgaggtaccagcctgcacccattcctcagatttcgggggcgtcgccattattaaatatgcagccagcaagaaaggcaagtgtgcggtgcattcgatgaccaacgccgtcacaattcgggaagctgagatagaagttgaagggaattctcagctgcaaatctctttctcgacggccttggccagcgccgaattccgcgtacaagtctgttctacacaagtacactgtgtagccgagtgccaccctccgaaggaccacatagtcaattacccggcgtcacataccaccctcggggtccaggacatttccgctacggcgctgtcatgggtgcagaagatcacgggaggcgtgggactggttgtcgctgttgcagcactgattctaatcgtggtgctatgcgtgtcgttcagcaggcactgataataggctggagcctcggtggccatgcttcttgccccttgggcctccccccagcccctcctccccttcctgcacccgtacccccgtggtctttgaataaagtctgagtgggcggc

SEQ ID NO: 398 - RNA, 5389 nt, unidentified
  source 1..5389: mol_type = genomic RNA; note = Chikungunya Virus
tcaagcttttggaccctcgtacagaagctaatacgactcactatagggaaataagagagaaaagaagagtaagaagaaatataagagccaccatgagtattaaggaccacttcaatgtctataaagccacaagaccgtacctagctcactgtcccgactgtggagaagggcactcgtgccatagtcccgtagcgctagaacgcatcagaaacgaagcgacagacgggacgttgaaaatccaggtttccttgcaaatcggaataaagacggatgatagccatgattggaccaagctgcgttatatggacaatcacatgccagcagacgcagagcgggccgggctatttgtaagaacgtcagcaccgtgcacgattactggaacaatgggacacttcattctggcccgatgtccgaaaggagaaactctgacggtggggttcactgacggtaggaagatcagtcactcatgtacgcacccatttcaccatgaccctcctgtgataggccgggaaaaattccattcccgaccgcagcacggtagggaactaccttgcagcacgtacgcgcagagcaccgctgcaactgccgaggagatagaggtacacatgcccccagacaccccagatcgcacattaatgtcacaacagtccggcaatgtaaagatcacagtcaatagtcagacggtgcggtacaagtgcaattgtggtgactcaagtgaaggattaaccactacagataaagtgattaataactgcaaggtcgatcaatgccatgccgcggtcaccaatcacaaaaaatggcagtataactcccctctggtcccgcgtaatgctgaattcggggaccggaaaggaaaagttcacattccatttcctctggcaaatgtgacatgcagggtgcctaaagcaagaaaccccaccgtgacgtacggaaaaaaccaagtcatcatgttgctgtatcctgaccacccaacgctcctgtcctacaggaatatgggagaagaaccaaactatcaagaagagtgggtgacgcataagaaggagatcaggttaaccgtgccgactgaggggctcgaggtcacgtggggtaacaatgagccgtacaagtattggccgcagttatccacaaacggtacagcccacggccacccgcatgagataattctgtattattatgagctgtacccaactatgactgcggtagttttgtcagtggcctcgttcatactcctgtcgatggtgggtgtggcagtggggatgtgcatgtgtgcacgacgcagatgcattacaccgtacgaactgacaccaggagctaccgtccctttcctgcttagcctaatatgctgcattagaacagctaaagcgtacgaacacgtaacagtgatcccgaacacggtgggagtaccgtataagactctagtcaacagaccgggctacagccccatggtattggagatggagcttctgtctgtcaccttggaaccaacgctatcgcttgattacatcacgtgcgagtataaaaccgttatcccgtctccgtacgtgaaatgctgcggtacagcagagtgtaaggacaagagcctacctgattacagctgtaaggtcttcaccggcgtctacccattcatgtggggcggcgcctactgcttctgcgacaccgaaaatacgcaattgagcgaagcacatgtggagaagtccgaatcatgcaaaacagaatttgcatcagcatacagggctcataccgcatccgcatcagctaagctccgcgtcctttaccaaggaaataatatcactgtggctgcttatgcaaacggcgaccatgccgtcacagttaaggacgctaaattcatagtggggccaatgtcttcagcctggacacctttcgacaataaaatcgtggtgtacaaaggcgacgtctacaacatggactacccgcccttcggcgcaggaagaccaggacaatttggcgacatccaaagtcgcacgcctgagagcgaagacgtctatgctaatacacaactggtactgcagagaccgtccgcgggtacggtgcacgtgccgtactctcaggcaccatctggcttcaagtattggctaaaagaacgaggggcgtcgctgcagcacacagcaccatttggctgtcaaatagcaacaaacccggtaagagcgatgaactgcgccgtagggaacatgcctatctccatcgacataccggacgcggcctttaccagggtcgtcgacgcgccatctttaacggacatgtcgtgtgaggtatcagcctgcacccattcctcagactttgggggcgtagccatcattaaatatgcagccagtaagaaaggcaagtgtgcagtgcactcgatgactaacgccgtcactattcgggaagctgaaatagaagtagaagggaactctcagttgcaaatctctttttcgacggccctagccagcgccgaatttcgcgtacaagtctgttctacacaagtacactgtgcagccgagtgccatccaccgaaagaccatatagtcaattacccggcgtcacacaccaccctcggggtccaagacatttccgctacggcgatgtcatgggtgcagaagatcacgggaggtgtgggactggttgtcgctgttgcagcactgatcctaatcgtggtgctatgcgtgtcgtttagcaggcacatgagtattaaggaccacttcaatgtctataaagccacaagaccgtacctagctcactgtcccgactgtggagaagggcactcgtgccatagtcccgtagcgctagaacgcatcagaaacgaagcgacagacgggacgttgaaaatccaggtttccttgcaaatcggaataaagacggatgatagccatgattggaccaagctgcgttatatggacaatcacatgccagcagacgcagagcgggccgggctatttgtaagaacgtcagcaccgtgcacgattactggaacaatgggacacttcattctggcccgatgtccgaaaggagaaactctgacggtggggttcactgacggtaggaagatcagtcactcatgtacgcacccatttcaccatgaccctcctgtgataggccgggaaaaattccattcccgaccgcagcacggtagggaactaccttgcagcacgtacgcgcagagcaccgctgcaactgccgaggagatagaggtacacatgcccccagacaccccagatcgcacattaatgtcacaacagtccggcaatgtaaagatcacagtcaatagtcagacggtgcggtacaagtgcaattgtggtgactcaagtgaaggattaaccactacagataaagtgattaataactgcaaggtcgatcaatgccatgccgcggtcaccaatcacaaaaaatggcagtataactcccctctggtcccgcgtaatgctgaattcggggaccggaaaggaaaagttcacattccatttcctctggcaaatgtgacatgcagggtgcctaaagcaagaaaccccaccgtgacgtacggaaaaaaccaagtcatcatgttgctgtatcctgaccacccaacgctcctgtcctacaggaatatgggagaagaaccaaactatcaagaagagtgggtgacgcataagaaggagatcaggttaaccgtgccgactgaggggctcgaggtcacgtggggtaacaatgagccgtacaagtattggccgcagttatccacaaacggtacagcccacggccacccgcatgagataattctgtattattatgagctgtacccaactatgactgcggtagttttgtcagtggcctcgttcatactcctgtcgatggtgggtgtggcagtggggatgtgcatgtgtgcacgacgcagatgcattacaccgtacgaactgacaccaggagctaccgtccctttcctgcttagcctaatatgctgcattagaacagctaaagcgtacgaacacgtaacagtgatcccgaacacggtgggagtaccgtataagactctagtcaacagaccgggctacagccccatggtattggagatggagcttctgtctgtcaccttggaaccaacgctatcgcttgattacatcacgtgcgagtataaaaccgttatcccgtctccgtacgtgaaatgctgcggtacagcagagtgtaaggacaagagcctacctgattacagctgtaaggtcttcaccggcgtctacccattcatgtggggcggcgcctactgcttctgcgacaccgaaaatacgcaattgagcgaagcacatgtggagaagtccgaatcatgcaaaacagaatttgcatcagcatacagggctcataccgcatccgcatcagctaagctccgcgtcctttaccaaggaaataatatcactgtggctgcttatgcaaacggcgaccatgccgtcacagttaaggacgctaaattcatagtggggccaatgtcttcagcctggacacctttcgacaataaaatcgtggtgtacaaaggcgacgtctacaacatggactacccgcccttcggcgcaggaagaccaggacaatttggcgacatccaaagtcgcacgcctgagagcgaagacgtctatgctaatacacaactggtactgcagagaccgtccgcgggtacggtgcacgtgccgtactctcaggcaccatctggcttcaagtattggctaaaagaacgaggggcgtcgctgcagcacacagcaccatttggctgtcaaatagcaacaaacccggtaagagcgatgaactgcgccgtagggaacatgcctatctccatcgacataccggacgcggcctttaccagggtcgtcgacgcgccatctttaacggacatgtcgtgtgaggtatcagcctgcacccattcctcagactttgggggcgtagccatcattaaatatgcagccagtaagaaaggcaagtgtgcagtgcactcgatgactaacgccgtcactattcgggaagctgaaatagaagtagaagggaactctcagttgcaaatctctttttcgacggccctagccagcgccgaatttcgcgtacaagtctgttctacacaagtacactgtgcagccgagtgccatccaccgaaagaccatatagtcaattacccggcgtcacacaccaccctcggggtccaagacatttccgctacggcgatgtcatgggtgcagaagatcacgggaggtgtgggactggttgtcgctgttgcagcactgatcctaatcgtggtgctatgcgtgtcgtttagcaggcactgataataggctggagcctcggtggccatgcttcttgccccttgggcctccccccagcccctcctccccttcctgcacccgtacccccgtggtctttgaataaagtctgagtgggcggc

SEQ ID NO: 399 - RNA, 2902 nt, unidentified
  source 1..2902: mol_type = genomic RNA; note = Chikungunya Virus
tcaagcttttggaccctcgtacagaagctaatacgactcactatagggaaataagagagaaaagaagagtaagaagaaatataagagccaccatgccatatctagctcattgtcctgactgcggagaagggcattcgtgccacagccctatcgcattggagcgcatcagaaatgaagcaacggacggaacgctgaaaatccaggtctctttgcagatcgggataaagacagatgacagccacgattggaccaagctgcgctatatggatagccatacgccagcggacgcggagcgagccggattgcttgtaaggacttcagcaccgtgcacgatcaccgggaccatgggacactttattctcgcccgatgcccgaaaggagagacgctgacagtgggatttacggacagcagaaagatcagccacacatgcacacacccgttccatcatgaaccacctgtgataggtagggagaggttccactctcgaccacaacatggtaaagagttaccttgcagcacgtacgtgcagagcaccgctgccactgctgaggagatagaggtgcatatgcccccagatactcctgaccgcacgctgatgacgcagcagtctggcaacgtgaagatcacagttaatgggcagacggtgcggtacaagtgcaactgcggtggctcaaacgagggactgacaaccacagacaaagtgatcaataactgcaaaattgatcagtgccatgctgcagtcactaatcacaagaattggcaatacaactcccctttagtcccgcgcaacgctgaactcggggaccgtaaaggaaagatccacatcccattcccattggcaaacgtgacttgcagagtgccaaaagcaagaaaccctacagtaacttacggaaaaaaccaagtcaccatgctgctgtatcctgaccatccgacactcttgtcttaccgtaacatgggacaggaaccaaattaccacgaggagtgggtgacacacaagaaggaggttaccttgaccgtgcctactgagggtctggaggtcacttggggcaacaacgaaccatacaagtactggccgcagatgtctacgaacggtactgctcatggtcacccacatgagataatcttgtactattatgagctgtaccccactatgactgtagtcattgtgtcggtggcctcgttcgtgcttctgtcgatggtgggcacagcagtgggaatgtgtgtgtgcgcacggcgcagatgcattacaccatatgaattaacaccaggagccactgttcccttcctgctcagcctgctatgctgcctatggaacgaacagcagcccctgttctggttgcaggctcttatcccgctggccgccttgatcgtcctgtgcaactgtctgaaactcttgccatgctgctgtaagaccctggcttttttagccgtaatgagcatcggtgcccacactgtgagcgcgtacgaacacgtaacagtgatcccgaacacggtgggagtaccgtataagactcttgtcaacagaccgggttacagccccatggtgttggagatggagctacaatcagtcaccttggaaccaacactgtcacttgactacatcacgtgcgagtacaaaactgtcatcccctccccgtacgtgaagtgctgtggtacagcagagtgcaaggacaagagcctaccagactacagctgcaaggtctttactggagtctacccatttatgtggggcggcgcctactgcttttgcgacgccgaaaatacgcaattgagcgaggcacatgtagagaaatctgaatcttgcaaaacagagtttgcatcggcctacagagcccacaccgcatcggcgtcggcgaagctccgcgtcctttaccaaggaaacaacattaccgtagctgcctacgctaacggtgaccatgccgtcacagtaaaggacgccaagtttgtcgtgggcccaatgtcctccgcctggacaccttttgacaacaaaatcgtggtgtacaaaggcgacgtctacaacatggactacccaccttttggcgcaggaagaccaggacaatttggtgacattcaaagtcgtacaccggaaagtaaagacgtttatgccaacactcagttggtactacagaggccagcagcaggcacggtacatgtaccatactctcaggcaccatctggcttcaagtattggctgaaggaacgaggagcatcgctacagcacacggcaccgttcggttgccagattgcgacaaacccggtaagagctgtaaattgcgctgtggggaacataccaatttccatcgacataccggatgcggcctttactagggttgtcgatgcaccctctgtaacggacatgtcatgcgaagtaccagcctgcactcactcctccgactttgggggcgtcgccatcatcaaatacacagctagcaagaaaggtaaatgtgcagtacattcgatgaccaacgccgttaccattcgagaagccgacgtagaagtagaggggaactcccagctgcaaatatccttctcaacagccctggcaagcgccgagtttcgcgtgcaagtgtgctccacacaagtacactgcgcagccgcatgccaccctccaaaggaccacatagtcaattacccagcatcacacaccacccttggggtccaggatatatccacaacggcaatgtcttgggtgcagaagattacgggaggagtaggattaattgttgctgttgctgccttaattttaattgtggtgctatgcgtgtcgtttagcaggcactaatgataataggctggagcctcggtggccatgcttcttgccccttgggcctccccccagcccctcctccccttcctgcacccgtacccccgtggtctttgaataaagtctgagtgggcggc

SEQ ID NO: 400 - RNA, 3979 nt, unidentified
  source 1..3979: mol_type = genomic RNA; note = Chikungunya Virus
tcaagcttttggaccctcgtacagaagctaatacgactcactatagggaaataagagagaaaagaagagtaagaagaaatataagagccaccatggagtttatccctacgcagacgttctataatcggaggtaccagcccaggccttgggccccccgccctacaatccaagtgataagaccacgtcccaggccgcagagacaagccggccaattggcgcaactcatcagcgcagttaacaagttgaccatgcgagcggttcctcagcagaagccgaggcggaaccggaagaataagaaacaacgccaaaagaaacaggcgccgcagaacgaccctaaacagaagaaacaacctccccagaaaaagccagctcagaagaagaagaagcctggacgccgtgaaagaatgtgcatgaaaatcgaaaatgattgcatctttgaggtgaagcacgagggcaaagtgatggggtacgcatgcctggtgggcgataaggtcatgaagccagcacatgtgaaggggacaatcgataatgctgatctggccaagctagcttttaaacgtagctccaaatacgatcttgagtgtgcccagatacctgtgcacatgaaatctgatgcaagcaagttcacacacgagaagcctgagggctattataactggcatcatggtgcggttcagtactccggcggccgatttaccattcctacaggggcaggaaagccgggcgattcggggagacccattttcgacaacaaaggccgcgtggtagctatcgtgctcggtggggctaatgagggtgcacgtactgcacttagcgtggttacctggaataaggacattgtcacaaagattacaccggagggagcagaggaatggagcctggcactgcccgttctgtgcctgctggccaacaccactttcccatgtagtcaacccccttgcactccctgctgctatgagaaagagcctgagagcacgttacgtatgctggaagataatgtcatgaggcccgggtactatcaactgctcaaggctagtctgacatgctcgccccacaggcagcgcaggtccacgaaagataacttcaacgtttacaaggctactaggccttatttggcccactgtcccgattgcggagagggacattcttgtcatagtcctattgccttggagcgaatccgcaacgaggccactgatggaacccttaagattcaagtatctttgcagattggcattaagacagatgattcccatgactggacaaagcttcggtacatggactcacacacgcctgcagatgctgaaagggcagggctcttggtcaggacctcggccccttgtacaattaccgggaccatgggccacttcatccttgcacgctgccctaagggggagacgctgacggtgggctttactgactcgcgtaagatctcacacacatgtacacaccctttccaccacgaacctccagtcatagggagagagagatttcactctcgcccacagcatggcaaagagctgccatgctccacatatgtccagagcactgctgctaccgctgaagaaattgaggttcacatgccacccgatacaccagaccgtactctgatgacccaacagagcggcaacgtgaagattaccgtaaatggacagaccgtgagatataagtgcaactgtggtggctccaatgagggcttaacaacaacggataaggtgattaacaattgcaaaatagatcagtgccatgccgcagtgaccaatcacaagaattggcaatacaactcacccctagtgccgaggaacgcagaactaggcgacaggaaagggaaaatccatatacccttccccctagcaaatgtgacctgccgagtgcccaaggccagaaaccccacggttacttacggcaagaaccaggtgacgatgcttttgtacccagaccatcccaccttgctctcttatagaaacatgggacaggagcctaactatcatgaggagtgggtgacacacaagaaagaagtcacccttaccgtgcctaccgaagggcttgaagtcacctggggcaacaacgagccttacaagtattggccacagatgtccacaaacggaacagcccacggccacccgcacgagatcatactgtattactatgagctttatcccacaatgactgtcgtaattgtgagcgttgccagcttcgtgttgctttcaatggttggcactgccgtggggatgtgcgtgtgtgctaggcgccgctgtataactccttatgaactaactccaggcgccaccgttcctttcctgctctcactactgtgttgtgtgcgcacaacaaaggctgccacctactacgaagccgccgcctacttatggaatgaacagcagcctctcttttggttacaggcgctgattcctcttgctgccctgatcgtgctatgcaactgcctcaagctgctgccctgttgttgcaagaccctagcttttctcgccgtgatgagcatcggggcacatacagtgtccgcctatgagcacgtcaccgttatcccgaacaccgtcggtgtgccatataagacgttagtcaatcgacccggctactctccaatggtgctggaaatggaactccagagtgtgacactggagccaaccttatccctcgattatattacctgcgaatacaagaccgtcatcccttcaccctatgtcaagtgctgtgggaccgctgaatgcaaagacaagagcttgcctgattacagttgcaaggtcttcacaggtgtgtaccccttcatgtgggggggagcttattgcttttgtgatgctgagaacacccaactgagcgaggctcacgtcgagaaatctgagtcttgcaagaccgagtttgcctcagcttacagggcccacacggccagcgcatccgccaaattgagggtactctaccagggtaataatatcaccgttgccgcatatgcaaacggcgatcacgccgtgactgtcaaggatgccaagttcgttgtgggccccatgtctagcgcttggacaccgttcgataataagatcgtcgtgtacaaaggggacgtgtataatatggactacccacctttcggggccggccgaccgggacagttcggggatattcagagccgcacacccgaatctaaagatgtttacgccaatactcagctcgtcctgcagaggcccgccgctggtacagttcacgttccttactcacaggcaccctctgggtttaagtattggctgaaagaacgaggtgccagcttgcagcatacagcgcctttcggatgccagattgccactaaccccgtacgggctgtcaactgcgcggtcggcaatattcccattagcattgatatcccggacgcagctttcaccagggttgtggacgccccgagcgtcaccgacatgagttgtgaggtgccagcctgcacgcatagcagtgatttcggcggcgtcgccatcattaaatataccgcaagcaagaaaggcaagtgcgccgtccactcgatgactaacgccgtcacaattcgggaagccgatgttgaggtcgaaggcaactcccagctgcagatcagcttctctactgctcttgcaagcgccgagtttcgagtccaggtctgcagtacgcaggtgcattgtgcagctgcctgccatccacccaaagatcatattgtgaattatccggcgtcacataccacactgggggtccaggatattagtacaacggcgatgtcctgggtgcagaaaattacgggaggagtgggcttaattgttgccgtggcggccctgatcctgatcgttgtgctgtgtgttagcttctctaggcatgactataaagatgacgatgacaaatgataataggctggagcctcggtggccatgcttcttgccccttgggcctccccccagcccctcctccccttcctgcacccgtacccccgtggtctttgaataaagtctgagtgggcggc

SEQ ID NO: 401 - RNA, 3955 nt, unidentified
  source 1..3955: mol_type = genomic RNA; note = Chikungunya Virus
tcaagcttttggaccctcgtacagaagctaatacgactcactatagggaaataagagagaaaagaagagtaagaagaaatataagagccaccatggagtttatccctacgcagacgttctataatcggaggtaccagcccaggccttgggccccccgccctacaatccaagtgataagaccacgtcccaggccgcagagacaagccggccaattggcgcaactcatcagcgcagttaacaagttgaccatgcgagcggttcctcagcagaagccgaggcggaaccggaagaataagaaacaacgccaaaagaaacaggcgccgcagaacgaccctaaacagaagaaacaacctccccagaaaaagccagctcagaagaagaagaagcctggacgccgtgaaagaatgtgcatgaaaatcgaaaatgattgcatctttgaggtgaagcacgagggcaaagtgatggggtacgcatgcctggtgggcgataaggtcatgaagccagcacatgtgaaggggacaatcgataatgctgatctggccaagctagcttttaaacgtagctccaaatacgatcttgagtgtgcccagatacctgtgcacatgaaatctgatgcaagcaagttcacacacgagaagcctgagggctattataactggcatcatggtgcggttcagtactccggcggccgatttaccattcctacaggggcaggaaagccgggcgattcggggagacccattttcgacaacaaaggccgcgtggtagctatcgtgctcggtggggctaatgagggtgcacgtactgcacttagcgtggttacctggaataaggacattgtcacaaagattacaccggagggagcagaggaatggagcctggcactgcccgttctgtgcctgctggccaacaccactttcccatgtagtcaacccccttgcactccctgctgctatgagaaagagcctgagagcacgttacgtatgctggaagataatgtcatgaggcccgggtactatcaactgctcaaggctagtctgacatgctcgccccacaggcagcgcaggtccacgaaagataacttcaacgtttacaaggctactaggccttatttggcccactgtcccgattgcggagagggacattcttgtcatagtcctattgccttggagcgaatccgcaacgaggccactgatggaacccttaagattcaagtatctttgcagattggcattaagacagatgattcccatgactggacaaagcttcggtacatggactcacacacgcctgcagatgctgaaagggcagggctcttggtcaggacctcggccccttgtacaattaccgggaccatgggccacttcatccttgcacgctgccctaagggggagacgctgacggtgggctttactgactcgcgtaagatctcacacacatgtacacaccctttccaccacgaacctccagtcatagggagagagagatttcactctcgcccacagcatggcaaagagctgccatgctccacatatgtccagagcactgctgctaccgctgaagaaattgaggttcacatgccacccgatacaccagaccgtactctgatgacccaacagagcggcaacgtgaagattaccgtaaatggacagaccgtgagatataagtgcaactgtggtggctccaatgagggcttaacaacaacggataaggtgattaacaattgcaaaatagatcagtgccatgccgcagtgaccaatcacaagaattggcaatacaactcacccctagtgccgaggaacgcagaactaggcgacaggaaagggaaaatccatatacccttccccctagcaaatgtgacctgccgagtgcccaaggccagaaaccccacggttacttacggcaagaaccaggtgacgatgcttttgtacccagaccatcccaccttgctctcttatagaaacatgggacaggagcctaactatcatgaggagtgggtgacacacaagaaagaagtcacccttaccgtgcctaccgaagggcttgaagtcacctggggcaacaacgagccttacaagtattggccacagatgtccacaaacggaacagcccacggccacccgcacgagatcatactgtattactatgagctttatcccacaatgactgtcgtaattgtgagcgttgccagcttcgtgttgctttcaatggttggcactgccgtggggatgtgcgtgtgtgctaggcgccgctgtataactccttatgaactaactccaggcgccaccgttcctttcctgctctcactactgtgttgtgtgcgcacaacaaaggctgccacctactacgaagccgccgcctacttatggaatgaacagcagcctctcttttggttacaggcgctgattcctcttgctgccctgatcgtgctatgcaactgcctcaagctgctgccctgttgttgcaagaccctagcttttctcgccgtgatgagcatcggggcacatacagtgtccgcctatgagcacgtcaccgttatcccgaacaccgtcggtgtgccatataagacgttagtcaatcgacccggctactctccaatggtgctggaaatggaactccagagtgtgacactggagccaaccttatccctcgattatattacctgcgaatacaagaccgtcatcccttcaccctatgtcaagtgctgtgggaccgctgaatgcaaagacaagagcttgcctgattacagttgcaaggtcttcacaggtgtgtaccccttcatgtgggggggagcttattgcttttgtgatgctgagaacacccaactgagcgaggctcacgtcgagaaatctgagtcttgcaagaccgagtttgcctcagcttacagggcccacacggccagcgcatccgccaaattgagggtactctaccagggtaataatatcaccgttgccgcatatgcaaacggcgatcacgccgtgactgtcaaggatgccaagttcgttgtgggccccatgtctagcgcttggacaccgttcgataataagatcgtcgtgtacaaaggggacgtgtataatatggactacccacctttcggggccggccgaccgggacagttcggggatattcagagccgcacacccgaatctaaagatgtttacgccaatactcagctcgtcctgcagaggcccgccgctggtacagttcacgttccttactcacaggcaccctctgggtttaagtattggctgaaagaacgaggtgccagcttgcagcatacagcgcctttcggatgccagattgccactaaccccgtacgggctgtcaactgcgcggtcggcaatattcccattagcattgatatcccggacgcagctttcaccagggttgtggacgccccgagcgtcaccgacatgagttgtgaggtgccagcctgcacgcatagcagtgatttcggcggcgtcgccatcattaaatataccgcaagcaagaaaggcaagtgcgccgtccactcgatgactaacgccgtcacaattcgggaagccgatgttgaggtcgaaggcaactcccagctgcagatcagcttctctactgctcttgcaagcgccgagtttcgagtccaggtctgcagtacgcaggtgcattgtgcagctgcctgccatccacccaaagatcatattgtgaattatccggcgtcacataccacactgggggtccaggatattagtacaacggcgatgtcctgggtgcagaaaattacgggaggagtgggcttaattgttgccgtggcggccctgatcctgatcgttgtgctgtgtgttagcttctctaggcattgataataggctggagcctcggtggccatgcttcttgccccttgggcctccccccagcccctcctccccttcctgcacccgtacccccgtggtctttgaataaagtctgagtgggcggc

SEQ ID NO: 402 - protein, 440 aa, unidentified
  source 1..440: note = Chikungunya Virus
MYEHVTVIPNTVGVPYKTLVNRPGYSPMVLEMELLSVTLEPTLSLDYITCEYKTVIPSPYVKCCGTAECKDKSLPDYSCKVFTGVYPFMWGGAYCFCDTENTQLSEAHVEKSESCKTEFASAYRAHTASASAKLRVLYQGNNITVAAYANGDHAVTVKDAKFIVGPMSSAWTPFDNKIVVYKGDVYNMDYPPFGAGRPGQFGDIQSRTPESEDVYANTQLVLQRPSAGTVHVPYSQAPSGFKYWLKERGASLQHTAPFGCQIATNPVRAMNCAVGNMPISIDIPDAAFTRVVDAPSLTDMSCEVSACTHSSDFGGVAIIKYAASKKGKCAVHSMTNAVTIREAEIEVEGNSQLQISFSTALASAEFRVQVCSTQVHCAAECHPPKDHIVNYPASHTTLGVQDISATAMSWVQKITGGVGLVVAVAALILIVVLCVSFSRH

SEQ ID NO: 403 - protein, 440 aa, unidentified
  source 1..440: note = Chikungunya Virus
MYEHVTVIPNTVGVPYKTLVNRPGYSPMVLEMELLSVTLEPTLSLDYITCEYKTVIPSPYVKCCGTAECKDKNLPDYSCKVFTGVYPFMWGGAYCFCDAENTQLSEAHVEKSESCKTEFASAYRAHTASASAKLRVLYQGNNITVTAYANGDHAVTVKDAKFIVGPMSSAWTPFDNKIVVYKGDVYNMDYPPFGAGRPGQFGDIQSRTPESKDVYANTQLVLQRPAAGTVHVPYSQAPSGFKYWLKERGASLQHTAPFGCQIATNPVRAVNCAVGNMPISIDIPDAAFIRVVDAPSLTDMSCEVPACTHSSDFGGVAIIKYAASKKGKCAVHSMTNAVTIREAEIEVEGNSQLQISFSTALASAEFRVQVCSTQVHCVAECHPPKDHIVNYPASHTTLGVQDISATALSWVQKITGGVGLVVAVAALILIVVLCVSFSRH

SEQ ID NO: 404 - protein, 1726 aa, unidentified
  source 1..1726: note = Chikungunya Virus
MSIKDHFNVYKATRPYLAHCPDCGEGHSCHSPVALERIRNEATDGTLKIQVSLQIGIKTDDSHDWTKLRYMDNHMPADAERAGLFVRTSAPCTITGTMGHFILARCPKGETLTVGFTDGRKISHSCTHPFHHDPPVIGREKFHSRPQHGRELPCSTYAQSTAATAEEIEVHMPPDTPDRTLMSQQSGNVKITVNSQTVRYKCNCGDSSEGLTTTDKVINNCKVDQCHAAVTNHKKWQYNSPLVPRNAEFGDRKGKVHIPFPLANVTCRVPKARNPTVTYGKNQVIMLLYPDHPTLLSYRNMGEEPNYQEEWVTHKKEIRLTVPTEGLEVTWGNNEPYKYWPQLSTNGTAHGHPHEIILYYYELYPTMTAVVLSVASFILLSMVGVAVGMCMCARRRCITPYELTPGATVPFLLSLICCIRTAKAYEHVTVIPNTVGVPYKTLVNRPGYSPMVLEMELLSVTLEPTLSLDYITCEYKTVIPSPYVKCCGTAECKDKSLPDYSCKVFTGVYPFMWGGAYCFCDTENTQLSEAHVEKSESCKTEFASAYRAHTASASAKLRVLYQGNNITVAAYANGDHAVTVKDAKFIVGPMSSAWTPFDNKIVVYKGDVYNMDYPPFGAGRPGQFGDIQSRTPESEDVYANTQLVLQRPSAGTVHVPYSQAPSGFKYWLKERGASLQHTAPFGCQIATNPVRAMNCAVGNMPISIDIPDAAFTRVVDAPSLTDMSCEVSACTHSSDFGGVAIIKYAASKKGKCAVHSMTNAVTIREAEIEVEGNSQLQISFSTALASAEFRVQVCSTQVHCAAECHPPKDHIVNYPASHTTLGVQDISATAMSWVQKITGGVGLVVAVAALILIVVLCVSFSRHMSIKDHFNVYKATRPYLAHCPDCGEGHSCHSPVALERIRNEATDGTLKIQVSLQIGIKTDDSHDWTKLRYMDNHMPADAERAGLFVRTSAPCTITGTMGHFILARCPKGETLTVGFTDGRKISHSCTHPFHHDPPVIGREKFHSRPQHGRELPCSTYAQSTAATAEEIEVHMPPDTPDRTLMSQQSGNVKITVNSQTVRYKCNCGDSSEGLTTTDKVINNCKVDQCHAAVTNHKKWQYNSPLVPRNAEFGDRKGKVHIPFPLANVTCRVPKARNPTVTYGKNQVIMLLYPDHPTLLSYRNMGEEPNYQEEWVTHKKEIRLTVPTEGLEVTWGNNEPYKYWPQLSTNGTAHGHPHEIILYYYELYPTMTAVVLSVASFILLSMVGVAVGMCMCARRRCITPYELTPGATVPFLLSLICCIRTAKAYEHVTVIPNTVGVPYKTLVNRPGYSPMVLEMELLSVTLEPTLSLDYITCEYKTVIPSPYVKCCGTAECKDKSLPDYSCKVFTGVYPFMWGGAYCFCDTENTQLSEAHVEKSESCKTEFASAYRAHTASASAKLRVLYQGNNITVAAYANGDHAVTVKDAKFIVGPMSSAWTPFDNKIVVYKGDVYNMDYPPFGAGRPGQFGDIQSRTPESEDVYANTQLVLQRPSAGTVHVPYSQAPSGFKYWLKERGASLQHTAPFGCQIATNPVRAMNCAVGNMPISIDIPDAAFTRVVDAPSLTDMSCEVSACTHSSDFGGVAIIKYAASKKGKCAVHSMTNAVTIREAEIEVEGNSQLQISFSTALASAEFRVQVCSTQVHCAAECHPPKDHIVNYPASHTTLGVQDISATAMSWVQKITGGVGLVVAVAALILIVVLCVSFSRH

SEQ ID NO: 405 - protein, 863 aa, unidentified
  source 1..863: note = Chikungunya Virus
MSTKDNFNVYKATRPYLAHCPDCGEGHSCHSPVALERIRNEATDGTLKIQVSLQIGIKTDDSHDWTKLRYMDNHTPADAERAGLFVRTSAPCTITGTMGHFILTRCPKGETLTVGFTDSRKISHSCTHPFHHDPPVIGREKFHSRPQHGKELPCSTYVQSTAATTEEIEVHMPPDTPDRTLMSQQSGNVKITVNGQTVRYKCNCGGSNEGLITTDKVINNCKVDQCHAAVTNHKKWQYNSPLVPRNAELGDRKGKIHIPFPLANVTCRVPKARNPTVTYGKNQVIMLLYPDHPTLLSYRNMGEEPNYQEEWVTHKKEVVLTVPTEGLEVTWGNNEPYKYWPQLSTNGTAHGHPHEIILYYYELYPTMTVVVVSVASFVLLSMVGVAVGMCMCARRRCITPYELTPGATVPFLLSLICCIRTAKAYEHVTVIPNTVGVPYKTLVNRPGYSPMVLEMELLSVTLEPTLSLDYITCEYKTVIPSPYVKCCGTAECKDKNLPDYSCKVFTGVYPFMWGGAYCFCDAENTQLSEAHVEKSESCKTEFASAYRAHTASASAKLRVLYQGNNITVTAYANGDHAVTVKDAKFIVGPMSSAWTPFDNKIVVYKGDVYNMDYPPFGAGRPGQFGDIQSRTPESKDVYANTQLVLQRPAAGTVHVPYSQAPSGFKYWLKERGASLQHTAPFGCQIATNPVRAVNCAVGNMPISIDIPDAAFIRVVDAPSLTDMSCEVPACTHSSDFGGVAIIKYAASKKGKCAVHSMTNAVTIREAEIEVEGNSQLQISFSTALASAEFRVQVCSTQVHCVAECHPPKDHIVNYPASHTTLGVQDISATALSWVQKITGGVGLVVAVAALILIVVLCVSFSRH

SEQ ID NO: 406 - protein, 424 aa, unidentified
  source 1..424: note = Chikungunya Virus
MSIKDHFNVYKATRPYLAHCPDCGEGHSCHSPVALERIRNEATDGTLKIQVSLQIGIKTDDSHDWTKLRYMDNHMPADAERAGLFVRTSAPCTITGTMGHFILARCPKGETLTVGFTDGRKISHSCTHPFHHDPPVIGREKFHSRPQHGRELPCSTYAQSTAATAEEIEVHMPPDTPDRTLMSQQSGNVKITVNSQTVRYKCNCGDSSEGLTTTDKVINNCKVDQCHAAVTNHKKWQYNSPLVPRNAEFGDRKGKVHIPFPLANVTCRVPKARNPTVTYGKNQVIMLLYPDHPTLLSYRNMGEEPNYQEEWVTHKKEIRLTVPTEGLEVTWGNNEPYKYWPQLSTNGTAHGHPHEIILYYYELYPTMTAVVLSVASFILLSMVGVAVGMCMCARRRCITPYELTPGATVPFLLSLICCIRTAKA

SEQ ID NO: 407 - protein, 424 aa, unidentified
  source 1..424: note = Chikungunya Virus
MSTKDNFNVYKATRPYLAHCPDCGEGHSCHSPVALERIRNEATDGTLKIQVSLQIGIKTDDSHDWTKLRYMDNHTPADAERAGLFVRTSAPCTITGTMGHFILTRCPKGETLTVGFTDSRKISHSCTHPFHHDPPVIGREKFHSRPQHGKELPCSTYVQSTAATTEEIEVHMPPDTPDRTLMSQQSGNVKITVNGQTVRYKCNCGGSNEGLITTDKVINNCKVDQCHAAVTNHKKWQYNSPLVPRNAELGDRKGKIHIPFPLANVTCRVPKARNPTVTYGKNQVIMLLYPDHPTLLSYRNMGEEPNYQEEWVTHKKEVVLTVPTEGLEVTWGNNEPYKYWPQLSTNGTAHGHPHEIILYYYELYPTMTVVVVSVASFVLLSMVGVAVGMCMCARRRCITPYELTPGATVPFLLSLICCIRTAKA

SEQ ID NO: 408 - protein, 1248 aa, unidentified
  source 1..1248: note = Chikungunya Virus
MEFIPTQTFYNRRYQPRPWAPRPTIQVIRPRPRPQRQAGQLAQLISAVNKLTMRAVPQQKPRRNRKNKKQRQKKQAPQNDPKQKKQPPQKKPAQKKKKPGRRERMCMKIENDCIFEVKHEGKVMGYACLVGDKVMKPAHVKGTIDNADLAKLAFKRSSKYDLECAQIPVHMKSDASKFTHEKPEGYYNWHHGAVQYSGGRFTIPTGAGKPGDSGRPIFDNKGRVVAIVLGGANEGARTALSVVTWNKDIVTKITPEGAEEWSLALPVLCLLANTTFPCSQPPCTPCCYEKEPESTLRMLEDNVMRPGYYQLLKASLTCSPHRQRRSTKDNFNVYKATRPYLAHCPDCGEGHSCHSPIALERIRNEATDGTLKIQVSLQIGIKTDDSHDWTKLRYMDSHTPADAERAGLLVRTSAPCTITGTMGHFILARCPKGETLTVGFTDSRKISHTCTHPFHHEPPVIGRERFHSRPQHGKELPCSTYVQSTAATAEEIEVHMPPDTPDRTLMTQQSGNVKITVNGQTVRYKCNCGGSNEGLTTTDKVINNCKIDQCHAAVTNHKNWQYNSPLVPRNAELGDRKGKIHIPFPLANVTCRVPKARNPTVTYGKNQVTMLLYPDHPTLLSYRNMGQEPNYHEEWVTHKKEVTLTVPTEGLEVTWGNNEPYKYWPQMSTNGTAHGHPHEIILYYYELYPTMTVVIVSVASFVLLSMVGTAVGMCVCARRRCITPYELTPGATVPFLLSLLCCVRTTKAATYYEAAAYLWNEQQPLFWLQALIPLAALIVLCNCLKLLPCCCKTLAFLAVMSIGAHTVSAYEHVTVIPNTVGVPYKTLVNRPGYSPMVLEMELQSVTLEPTLSLDYITCEYKTVIPSPYVKCCGTAECKDKSLPDYSCKVFTGVYPFMWGGAYCFCDAENTQLSEAHVEKSESCKTEFASAYRAHTASASAKLRVLYQGNNITVAAYANGDHAVTVKDAKFVVGPMSSAWTPFDNKIVVYKGDVYNMDYPPFGAGRPGQFGDIQSRTPESKDVYANTQLVLQRPAAGTVHVPYSQAPSGFKYWLKERGASLQHTAPFGCQIATNPVRAVNCAVGNIPISIDIPDAAFTRVVDAPSVTDMSCEVPACTHSSDFGGVAIIKYTASKKGKCAVHSMTNAVTIREADVEVEGNSQLQISFSTALASAEFRVQVCSTQVHCAAACHPPKDHIVNYPASHTTLGVQDISTTAMSWVQKITGGVGLIVAVAALILIVVLCVSFSRH

SEQ ID NO: 409 - protein, 1248 aa, unidentified; identical to SEQ ID NO: 408
  source 1..1248: note = Chikungunya Virus

SEQ ID NO: 410 - protein, 440 aa, unidentified
  source 1..440: note = Chikungunya Virus
MYEHVTVIPNTVGVPYKTLVNRPGYSPMVLEMELQSVTLEPTLSLDYITCEYKTVIPSPYVKCCGTAECKDKSLPDYSCKVFTGVYPFMWGGAYCFCDAENTQLSEAHVEKSESCKTEFASAYRAHTASASAKLRVLYQGNNITVAAYANGDHAVTVKDAKFVVGPMSSAWTPFDNKIVVYKGDVYNMDYPPFGAGRPGQFGDIQSRTPESKDVYANTQLVLQRPAAGTVHVPYSQAPSGFKYWLKERGASLQHTAPFGCQIATNPVRAVNCAVGNIPISIDIPDAAFTRVVDAPSVTDMSCEVPACTHSSDFGGVAIIKYTASKKGKCAVHSMTNAVTIREADVEVEGNSQLQISFSTALASAEFRVQVCSTQVHCAAACHPPKDHIVNYPASHTTLGVQDISTTAMSWVQKITGGVGLIVAVAALILIVVLCVSFSRH

SEQ ID NO: 411 - protein, 924 aa, unidentified
  source 1..924: note = Chikungunya Virus
MSTKDNFNVYKATRPYLAHCPDCGEGHSCHSPIALERIRNEATDGTLKIQVSLQIGIKTDDSHDWTKLRYMDSHTPADAERAGLLVRTSAPCTITGTMGHFILARCPKGETLTVGFTDSRKISHTCTHPFHHEPPVIGRERFHSRPQHGKELPCSTYVQSTAATAEEIEVHMPPDTPDRTLMTQQSGNVKITVNGQTVRYKCNCGGSNEGLTTTDKVINNCKIDQCHAAVTNHKNWQYNSPLVPRNAELGDRKGKIHIPFPLANVTCRVPKARNPTVTYGKNQVTMLLYPDHPTLLSYRNMGQEPNYHEEWVTHKKEVTLTVPTEGLEVTWGNNEPYKYWPQMSTNGTAHGHPHEIILYYYELYPTMTVVIVSVASFVLLSMVGTAVGMCVCARRRCITPYELTPGATVPFLLSLLCCVRTTKAATYYEAAAYLWNEQQPLFWLQALIPLAALIVLCNCLKLLPCCCKTLAFLAVMSIGAHTVSAYEHVTVIPNTVGVPYKTLVNRPGYSPMVLEMELQSVTLEPTLSLDYITCEYKTVIPSPYVKCCGTAECKDKSLPDYSCKVFTGVYPFMWGGAYCFCDAENTQLSEAHVEKSESCKTEFASAYRAHTASASAKLRVLYQGNNITVAAYANGDHAVTVKDAKFVVGPMSSAWTPFDNKIVVYKGDVYNMDYPPFGAGRPGQFGDIQSRTPESKDVYANTQLVLQRPAAGTVHVPYSQAPSGFKYWLKERGASLQHTAPFGCQIATNPVRAVNCAVGNIPISIDIPDAAFTRVVDAPSVTDMSCEVPACTHSSDFGGVAIIKYTASKKGKCAVHSMTNAVTIREADVEVEGNSQLQISFSTALASAEFRVQVCSTQVHCAAACHPPKDHIVNYPASHTTLGVQDISTTAMSWVQKITGGVGLIVAVAALILIVVLCVSFSRH

SEQ ID NO: 412 - protein, 424 aa, unidentified
  source 1..424: note = Chikungunya Virus
MSTKDNFNVYKATRPYLAHCPDCGEGHSCHSPIALERIRNEATDGTLKIQVSLQIGIKTDDSHDWTKLRYMDSHTPADAERAGLLVRTSAPCTITGTMGHFILARCPKGETLTVGFTDSRKISHTCTHPFHHEPPVIGRERFHSRPQHGKELPCSTYVQSTAATAEEIEVHMPPDTPDRTLMTQQSGNVKITVNGQTVRYKCNCGGSNEGLTTTDKVINNCKIDQCHAAVTNHKNWQYNSPLVPRNAELGDRKGKIHIPFPLANVTCRVPKARNPTVTYGKNQVTMLLYPDHPTLLSYRNMGQEPNYHEEWVTHKKEVTLTVPTEGLEVTWGNNEPYKYWPQMSTNGTAHGHPHEIILYYYELYPTMTVVIVSVASFVLLSMVGTAVGMCVCARRRCITPYELTPGATVPFLLSLLCCVRTTKA

SEQ ID NO: 413 - protein, 1262 aa, unidentified
  source 1..1262: note = Chikungunya Virus
SSFWTLVQKLIRLTIGKERKEEEEIEPPWSLSLRRRSIIGGTSPGLGPPALQSKDHVPGRRDKPANWRNSSAQLTSPCERFLSRSRGGTGRIRNNAKRNRRRRTTLNRRNNLPRKSQLRRRRSLDAVKECAKSKMIASLRSTRAKWGTHAWWAIRSSQHMRGQSIMLIWPSLLNVAPNTILSVPRYLCTNLMQASSHTRSLRAIITGIMVRFSTPAADLPFLQGQESRAIRGDPFSTTKAAWLSCSVGLMRVHVLHLAWLPGIRTLSQRLHRREQRNGAWHCPFCACWPTPLSHVVNPLALPAAMRKSLRARYVCWKIMSGPGTINCSRLVHARPTGSAGPRKITSTFTRLLGLIWPTVPIAERDILVIVLLPWSESATRPLMEPLRFKYLCRLALRQMIPMTGQSFGTWTHTRLQMLKGQGSWSGPRPLVQLPGPWATSSLHAALRGRRRWALLTRVRSHTHVHTLSTTNLQSGERDFTLAHSMAKSCHAPHMSRALLLPLKKLRFTCHPIHQTVLPNRAATRLPMDRPDISATVVAPMRAQQRIRLTIAKISAMPQPITRIGNTTHPCRGTQNATGKGKSIYPSPQMPAECPRPETPRLLTARTRRCFCTQTIPPCSLIETWDRSLTIMRSGHTRKKSPLPCLPKGLKSPGATTSLTSIGHRCPQTEQPTATRTRSYCITMSFIPQLSLALPASCCFQWLALPWGCACVLGAAVLLMNLQAPPFLSCSHYCVVCAQQRLPPTTKPPPTYGMNSSLSFGYRRFLLLPSCYATASSCCPVVARPLFSPASGHIQCPPMSTSPLSRTPSVCHIRRSIDPATLQWCWKWNSRVHWSQPYPSIILPANTRPSSLHPMSSAVGPLNAKTRACLITVARSSQVCTPSCGGELIAFVMLRTPNARLTSRNLSLARPSLPQLTGPTRPAHPPNGYSTRVIISPLPHMQTAITPLSRMPSSLWAPCLALGHRSIIRSSCTKGTCIIWTTHLSGPADRDSSGIFRAAHPNLKMFTPILSSSCRGPPLVQFTFLTHRHPLGLSIGKNEVPACSIQRLSDARLPLTPYGLSTARSAIFPLALISRTQLSPGLWTPRASPTVVRCQPARIAVISAASPSLNIPQARKASAPSTRLTPSQFGKPMLRSKATPSCRSASLLLLQAPSFESRSAVRRCIVQLPAIHPKIILIIRRHIPHWGSRILVQRRCPGCRKLREEWALLPWRPSSLCCVLASLGIDNRLEPRWPCFLPLGPPPSPSSPSCTRTPVVFESLSGR

SEQ ID NO: 414 - protein, 9 aa, synthetic construct
  REGION 1..9: note = Synthetic Polynucleotide
HSMTNAVTI

SEQ ID NO: 415 - protein, 9 aa, synthetic construct
  REGION 1..9: note = Synthetic Polynucleotide
IILYYYELY

SEQ ID NO: 416 - protein, 9 aa, synthetic construct
  REGION 1..9: note = Synthetic Polynucleotide
ACLVGDKVM

SEQ ID NO: 417 - DNA, 1729 bp, synthetic construct
  misc_feature 1..1729: note = Synthetic Polynucleotide
  source 1..1729: mol_type = other DNA
tcaagcttttggaccctcgtacagaagctaatacgactcactatagggaaataagagagaaaagaagagtaagaagaaatataagagccaccatggcacaagtcattaatacaaacagcctgtcgctgttgacccagaataacctgaacaaatcccagtccgcactgggcactgctatcgagcgtttgtcttccggtctgcgtatcaacagcgcgaaagacgatgcggcaggacaggcgattgctaaccgttttaccgcgaacatcaaaggtctgactcaggcttcccgtaacgctaacgacggtatctccattgcgcagaccactgaaggcgcgctgaacgaaatcaacaacaacctgcagcgtgtgcgtgaactggcggttcagtctgcgaatggtactaactcccagtctgacctcgactccatccaggctgaaatcacccagcgcctgaacgaaatcgaccgtgtatccggccagactcagttcaacggcgtgaaagtcctggcgcaggacaacaccctgaccatccaggttggtgccaacgacggtgaaactatcgatattgatttaaaagaaatcagctctaaaacactgggacttgataagcttaatgtccaagatgcctacaccccgaaagaaactgctgtaaccgttgataaaactacctataaaaatggtacagatcctattacagcccagagcaatactgatatccaaactgcaattggcggtggtgcaacgggggttactggggctgatatcaaatttaaagatggtcaatactatttagatgttaaaggcggtgcttctgctggtgtttataaagccacttatgatgaaactacaaagaaagttaatattgatacgactgataaaactccgttggcaactgcggaagctacagctattcggggaacggccactataacccacaaccaaattgctgaagtaacaaaagagggtgttgatacgaccacagttgcggctcaacttgctgcagcaggggttactggcgccgataaggacaatactagccttgtaaaactatcgtttgaggataaaaacggtaaggttattgatggtggctatgcagtgaaaatgggcgacgatttctatgccgctacatatgatgagaaaacaggtgcaattactgctaaaaccactacttatacagatggtactggcgttgctcaaactggagctgtgaaatttggtggcgcaaatggtaaatctgaagttgttactgctaccgatggtaagacttacttagcaagcgaccttgacaaacataacttcagaacaggcggtgagcttaaagaggttaatacagataagactgaaaacccactgcagaaaattgatgctgccttggcacaggttgatacacttcgttctgacctgggtgcggttcagaaccgtttcaactccgctatcaccaacctgggcaataccgtaaataacctgtcttctgcccgtagccgtatcgaagattccgactacgcaaccgaagtctccaacatgtctcgcgcgcagattctgcagcaggccggtacctccgttctggcgcaggcgaaccaggttccgcaaaacgtcctctctttactgcgttgataataggctggagcctcggtggccatgcttcttgccccttgggcctccccccagcccctcctccccttcctgcacccgtacccccgtggtctttgaataaagtctgagtgggcggc

SEQ ID NO: 418 - DNA, 1518 bp, synthetic construct
  misc_feature 1..1518: note = Synthetic Polynucleotide
  source 1..1518: mol_type = other DNA
atggcacaagtcattaatacaaacagcctgtcgctgttgacccagaataacctgaacaaatcccagtccgcactgggcactgctatcgagcgtttgtcttccggtctgcgtatcaacagcgcgaaagacgatgcggcaggacaggcgattgctaaccgttttaccgcgaacatcaaaggtctgactcaggcttcccgtaacgctaacgacggtatctccattgcgcagaccactgaaggcgcgctgaacgaaatcaacaacaacctgcagcgtgtgcgtgaactggcggttcagtctgcgaatggtactaactcccagtctgacctcgactccatccaggctgaaatcacccagcgcctgaacgaaatcgaccgtgtatccggccagactcagttcaacggcgtgaaagtcctggcgcaggacaacaccctgaccatccaggttggtgccaacgacggtgaaactatcgatattgatttaaaagaaatcagctctaaaacactgggacttgataagcttaatgtccaagatgcctacaccccgaaagaaactgctgtaaccgttgataaaactacctataaaaatggtacagatcctattacagcccagagcaatactgatatccaaactgcaattggcggtggtgcaacgggggttactggggctgatatcaaatttaaagatggtcaatactatttagatgttaaaggcggtgcttctgctggtgtttataaagccacttatgatgaaactacaaagaaagttaatattgatacgactgataaaactccgttggcaactgcggaagctacagctattcggggaacggccactataacccacaaccaaattgctgaagtaacaaaagagggtgttgatacgaccacagttgcggctcaacttgctgcagcaggggttactggcgccgataaggacaatactagccttgtaaaactatcgtttgaggataaaaacggtaaggttattgatggtggctatgcagtgaaaatgggcgacgatttctatgccgctacatatgatgagaaaacaggtgcaattactgctaaaaccactacttatacagatggtactggcgttgctcaaactggagctgtgaaatttggtggcgcaaatggtaaatctgaagttgttactgctaccgatggtaagacttacttagcaagcgaccttgacaaacataacttcagaacaggcggtgagcttaaagaggttaatacagataagactgaaaacccactgcagaaaattgatgctgccttggcacaggttgatacacttcgttctgacctgggtgcggttcagaaccgtttcaactccgctatcaccaacctgggcaataccgtaaataacctgtcttctgcccgtagccgtatcgaagattccgactacgcaaccgaagtctccaacatgtctcgcgcgcagattctgcagcaggccggtacctccgttctggcgcaggcgaaccaggttccgcaaaacgtcctctctttactgcgt

SEQ ID NO: 419 - RNA, 1790 nt, synthetic construct
  misc_feature 1..1790: note = Synthetic Polynucleotide
  source 1..1790: mol_type = other RNA
ggggaaataagagagaaaagaagagtaagaagaaatataagagccaccatggcacaagtcattaatacaaacagcctgtcgctgttgacccagaataacctgaacaaatcccagtccgcactgggcactgctatcgagcgtttgtcttccggtctgcgtatcaacagcgcgaaagacgatgcggcaggacaggcgattgctaaccgttttaccgcgaacatcaaaggtctgactcaggcttcccgtaacgctaacgacggtatctccattgcgcagaccactgaaggcgcgctgaacgaaatcaacaacaacctgcagcgtgtgcgtgaactggcggttcagtctgcgaatggtactaactcccagtctgacctcgactccatccaggctgaaatcacccagcgcctgaacgaaatcgaccgtgtatccggccagactcagttcaacggcgtgaaagtcctggcgcaggacaacaccctgaccatccaggttggtgccaacgacggtgaaactatcgatattgatttaaaagaaatcagctctaaaacactgggacttgataagcttaatgtccaagatgcctacaccccgaaagaaactgctgtaaccgttgataaaactacctataaaaatggtacagatcctattacagcccagagcaatactgatatccaaactgcaattggcggtggtgcaacgggggttactggggctgatatcaaatttaaagatggtcaatactatttagatgttaaaggcggtgcttctgctggtgtttataaagccacttatgatgaaactacaaagaaagttaatattgatacgactgataaaactccgttggcaactgcggaagctacagctattcggggaacggccactataacccacaaccaaattgctgaagtaacaaaagagggtgttgatacgaccacagttgcggctcaacttgctgcagcaggggttactggcgccgataaggacaatactagccttgtaaaactatcgtttgaggataaaaacggtaaggttattgatggtggctatgcagtgaaaatgggcgacgatttctatgccgctacatatgatgagaaaacaggtgcaattactgctaaaaccactacttatacagatggtactggcgttgctcaaactggagctgtgaaatttggtggcgcaaatggtaaatctgaagttgttactgctaccgatggtaagacttacttagcaagcgaccttgacaaacataacttcagaacaggcggtgagcttaaagaggttaatacagataagactgaaaacccactgcagaaaattgatgctgccttggcacaggttgatacacttcgttctgacctgggtgcggttcagaaccgtttcaactccgctatcaccaacctgggcaataccgtaaataacctgtcttctgcccgtagccgtatcgaagattccgactacgcaaccgaagtctccaacatgtctcgcgcgcagattctgcagcaggccggtacctccgttctggcgcaggcgaaccaggttccgcaaaacgtcctctctttactgcgttgataataggctggagcctcggtggccatgcttcttgccccttgggcctccccccagcccctcctccccttcctgcacccgtacccccgtggtctttgaataaagtctgagtgggcggcaaaaaaaaaaaaaaaaaaaaaaaaaaaaaaaaaaaaaaaaaaaaaaaaaaaaaaaaaaaaaaaaaaaaaaaaaaaaaaaaaaaaaaaaaaaaaaaaaaaatctag

SEQ ID NO: 420 - protein, 508 aa, synthetic construct
  REGION 1..508: note = Synthetic Polynucleotide
MAQVINTNSLSLLTQNNLNKSQSALGTAIERLSSGLRINSAKDDAAGQAIANRFTANIKGLTQASRNANDGISIAQTTEGALNEINNNLQRVRELAVQSANGTNSQSDLDSIQAEITQRLNEIDRVSGQTQFNGVKVLAQDNTLTIQVGANDGETIDIDLKEISSKTLGLDKLNVQDAYTPKETAVTVDKTTYKNGTDPITAQSNTDIQTAIGGGATGVTGADIKFKDGQYYLDVKGGASAGVYKATYDETTKKVNIDTTDKTPLATAEATAIRGTATITHNQIAEVTKEGVDTTTVAAQLAAAGVTGADKDNTSLVKLSFEDKNGKVIDGGYAVKMGDDFYAATYDEKTGAITAKTTTYTDGTGVAQTGAVKFGGANGKSEVVTATDGKTYLASDLDKHNFRTGGELKEVNTDKTENPLQKIDAALAQVDTLRSDLGAVQNRFNSAITNLGNTVNNLSSARSRIEDSDYATEVSNMSRAQILQQAGTSINVLAQANQVPQNVLSLLR

SEQ ID NO: 421 - protein, 708 aa, synthetic construct
  REGION 1..708: note = Synthetic Polynucleotide
MAQVINTNSLSLLTQNNLNKSQSALGTAIERLSSGLRINSAKDDAAGQAIANRFTANIKGLTQASRNANDGISIAQTTEGALNEINNNLQRVRELAVQSANSTNSQSDLDSIQAEITQRLNEIDRVSGQTQFNGVKVLAQDNTLTIQVGANDGETIDIDLKQINSQTLGLDTLNVQQKYKVSDTAATVTGYADTTIALDNSTFKASATGLGGTDQKIDGDLKFDDTTGKYYAKVTVTGGTGKDGYYEVSINVDKTNGEVTLAGGATSPLTGGLPATATEDVKNVQVANADLTEAKAALTAAGVTGTASINVVKMSYTDNNGKTIDGGLAVKVGDDYYSATQNKDGSISINTTKYTADDGTSKTALNKLGGADGKTEVVSIGGKTYAASKAEGHNFKAQPDLAEAAATTTENPLQKIDAALAQVDTLRSDLGAVQNRFNSAITNLGNTVNNLTSARSRIEDSDYATEVSNMSRAQILQQAGTSINVLAQANQVPQNVLSLLRGGGGSGGGGSMMAPDPNANPNANPNANPNANPNANPNANPNANPNANPNANPNANPNANPNANPNANPNANPNANPNANPNANPNANPNANPNKNNQGNGQGHNMPNDPNRNVDENANANNAVKNNNNEEPSDKHIEQYLKKIKNSISTEWSPCSINVTCGNGIQVRIKPGSANKPKDELDYENDIEKKICKMEKCSSINVFNVVNS

SEQ ID NO: 422 - protein, 702 aa, synthetic construct
  REGION 1..702: note = Synthetic Polynucleotide
MMAPDPNANPNANPNANPNANPNANPNANPNANPNANPNANPNANPNANPNANPNANPNANPNANPNANPNANPNANPNANPNKNNQGNGQGHNMPNDPNRNVDENANANNAVKNNNNEEPSDKHIEQYLKKIKNSISTEWSPCSINVTCGNGIQVRIKPGSANKPKDELDYENDIEKKICKMEKCSSINVFNVVNSRPVTMAQVINTNSLSLLTQNNLNKSQSALGTAIERLSSGLRINSAKDDAAGQAIANRFTANIKGLTQASRNANDGISIAQTTEGALNEINNNLQRVRELAVQSANSTNSQSDLDSIQAEITQRLNEIDRVSGQTQFNGVKVLAQDNTLTIQVGANDGETIDIDLKQINSQTLGLDTLNVQQKYKVSDTAATVTGYADTTIALDNSTFKASATGLGGTDQKIDGDLKFDDTTGKYYAKVTVTGGTGKDGYYEVSINVDKTNGEVTLAGGATSPLTGGLPATATEDVKNVQVANADLTEAKAALTAAGVTGTASINVVKMSYTDNNGKTIDGGLAVKVGDDYYSATQNKDGSISINTTKYTADDGTSKTALNKLGGADGKTEVVSIGGKTYAASKAEGHNFKAQPDLAEAAATTTENPLQKIDAALAQVDTLRSDLGAVQNRFNSAITNLGNTVNNLTSARSRIEDSDYATEVSNMSRAQILQQAGTSINVLAQANQVPQNVLSLLR

SEQ ID NO: 423 - protein, 20 aa, synthetic construct
  REGION 1..20: note = Synthetic Polynucleotide
METPAQLLFLLLLWLPDTTG

SEQ ID NO: 424 - protein, 18 aa, synthetic construct
  REGION 1..18: note = Synthetic Polynucleotide
MDWTWILFLVAAATRVHS

SEQ ID NO: 425 - protein, 24 aa, synthetic construct
  REGION 1..24: note = Synthetic Polynucleotide
MLGSNSGQRVVFTILLLLVAPAYS

SEQ ID NO: 426 - protein, 17 aa, synthetic construct
  REGION 1..17: note = Synthetic Polynucleotide
MKCLLYLAFLFIGVNCA

SEQ ID NO: 427 - protein, 15 aa, synthetic construct
  REGION 1..15: note = Synthetic Polynucleotide
MWLVSLAIVTACAGA

SEQ ID NO: 428 - protein, 13 aa, Salmonella enterica
  source 1..13: note = typhimurium
LQRVRELAVQSAN

SEQ ID NO: 429 - protein, 4 aa, synthetic construct
  REGION 1..4: note = Synthetic Polynucleotide
GFLG

SEQ ID NO: 430 - protein, 4 aa, synthetic construct
  REGION 1..4: note = Synthetic Polynucleotide
KVSR

SEQ ID NO: 431 - protein, 5 aa, synthetic construct
  REGION 1..5: note = Synthetic Polynucleotide
TVGLR

SEQ ID NO: 432 - protein, 5 aa, synthetic construct
  REGION 1..5: note = Synthetic Polynucleotide
PMGLP

SEQ ID NO: 433 - protein, 5 aa, synthetic construct
  REGION 1..5: note = Synthetic Polynucleotide
PMGAP

SEQ ID NO: 434 - protein, 4 aa, synthetic construct
  REGION 1..4: note = Synthetic Polynucleotide
NANP

SEQ ID NO: 435 - protein, 4 aa, synthetic construct
  REGION 1..4: note = Synthetic Polynucleotide
NVDP

SEQ ID NO: 436 - protein, 9 aa, synthetic construct
  REGION 1..9: note = Synthetic Polynucleotide
TTDISEMGA

SEQ ID NO: 437 - protein, 9 aa, synthetic construct
  REGION 1..9: note = Synthetic Polynucleotide
TMWHVTRGA

SEQ ID NO: 438 - protein, 9 aa, synthetic construct
  REGION 1..9: note = Synthetic Polynucleotide
MWHVTRGAV

SEQ ID NO: 439 - protein, 9 aa, synthetic construct
  REGION 1..9: note = Synthetic Polynucleotide
GLYGNGVVT

SEQ ID NO: 440 - protein, 9 aa, synthetic construct
  REGION 1..9: note = Synthetic Polynucleotide
TLILAPTRV

SEQ ID NO: 441 - protein, 9 aa, synthetic construct
  REGION 1..9: note = Synthetic Polynucleotide
LILAPTRVV

SEQ ID NO: 442 - protein, 9 aa, synthetic construct
  REGION 1..9: note = Synthetic Polynucleotide
ILAPTRVVA

SEQ ID NO: 443 - protein, 9 aa, synthetic construct
  REGION 1..9: note = Synthetic Polynucleotide
VVAAEMEEA

SEQ ID NO: 444 - protein, 9 aa, synthetic construct
  REGION 1..9: note = Synthetic Polynucleotide
IVDLMCHAT

SEQ ID NO: 445 - protein, 9 aa, synthetic construct
  REGION 1..9: note = Synthetic Polynucleotide
LMCHATFTM

SEQ ID NO: 446 - protein, 9 aa, synthetic construct
  REGION 1..9: note = Synthetic Polynucleotide
MGEAAAIFM

SEQ ID NO: 447 - protein, 9 aa, synthetic construct
  REGION 1..9: note = Synthetic Polynucleotide
GEAAAIFMT

SEQ ID NO: 448 - protein, 9 aa, synthetic construct
  REGION 1..9: note = Synthetic Polynucleotide
KTVWFVPSI

SEQ ID NO: 449 - protein, 9 aa, synthetic construct
  REGION 1..9: note = Synthetic Polynucleotide
LMRRGDLPV

SEQ ID NO: 450 - protein, 9 aa, synthetic construct
  REGION 1..9: note = Synthetic Polynucleotide
TLLCDIGES

SEQ ID NO: 451 - protein, 9 aa, synthetic construct
  REGION 1..9: note = Synthetic Polynucleotide
LLCDIGESS

SEQ ID NO: 452 - protein, 9 aa, synthetic construct
  REGION 1..9: note = Synthetic Polynucleotide
AMTDTTPFG

SEQ ID NO: 453 - protein, 9 aa, synthetic construct
  REGION 1..9: note = Synthetic Polynucleotide
GQQRVFKEK

SEQ ID NO: 454 - protein, 9 aa, synthetic construct
  REGION 1..9: note = Synthetic Polynucleotide
KLTYQNKVV

SEQ ID NO: 455 - protein, 9 aa, synthetic construct
  REGION 1..9: note = Synthetic Polynucleotide
AISGDDCVV

SEQ ID NO: 456 - protein, 9 aa, synthetic construct
  REGION 1..9: note = Synthetic Polynucleotide
LMYFHRRDL

SEQ ID NO: 457 - protein, 9 aa, synthetic construct
  REGION 1..9: note = Synthetic Polynucleotide
RTLILAPTR

SEQ ID NO: 458 - protein, 9 aa, synthetic construct
  REGION 1..9: note = Synthetic Polynucleotide
TLILAPTRV

SEQ ID NO: 459 - protein, 9 aa, synthetic construct
  REGION 1..9: note = Synthetic Polynucleotide
MCHATFTMR

SEQ ID NO: 460 - protein, 9 aa, synthetic construct
  REGION 1..9: note = Synthetic Polynucleotide
TVWFVPSIK

SEQ ID NO: 461 - protein, 9 aa, synthetic construct
  REGION 1..9: note = Synthetic Polynucleotide
GQQRVFKEK

SEQ ID NO: 462 - protein, 9 aa, synthetic construct
  REGION 1..9: note = Synthetic Polynucleotide
CVYNMMGKR

SEQ ID NO: 463 - protein, 9 aa, synthetic construct
  REGION 1..9: note = Synthetic Polynucleotide
HTMWHVTRG

SEQ ID NO: 464 - protein, 9 aa, synthetic construct
  REGION 1..9: note = Synthetic Polynucleotide
RTLILAPTR

SEQ ID NO: 465 - protein, 9 aa, synthetic construct
  REGION 1..9: note = Synthetic Polynucleotide
TLILAPTRV

SEQ ID NO: 466 - protein, 9 aa, synthetic construct
  REGION 1..9: note = Synthetic Polynucleotide
MCHATFTMR

SEQ ID NO: 467 - protein, 9 aa, synthetic construct
  REGION 1..9: note = Synthetic Polynucleotide
ATFTMRLLS

SEQ ID NO: 468 - protein, 9 aa, synthetic construct
  REGION 1..9: note = Synthetic Polynucleotide
GEAAAIFMT

SEQ ID NO: 469 - protein, 168 aa, unidentified
  source 1..168: note = Zika Virus
AEVTRRGSAYYMYLDRNDAGEAISFPTTLGMNKCYIQIMDLGHMCDATMSYECPMLDEGVEPDDVDCWCNTTSTWVVYGTCHHKKGEARRSRRAVTLPSHSTRKLQTRSQTWLESREYTKHLIRVENWIFRNPGFALAAAAIAWLLGSSTSQKVIYLVMILLIAPAYS
